(19) United States
(12) Patent Application Publication
(10) Pub. No.: US 2009/0203014 A1
(43) Pub. Date: Aug. 13, 2009

(54) METHOD FOR DIAGNOSING AUTISM SPECTRUM DISORDER

(75) Inventors: Bai-Lin WU, Newton, MA (US); Yiping SHEN, Lexington, MA (US); David T. MILLER, Westwood, MA (US); Orah S. PLATT, Brookline, MA (US)

Correspondence Address: DAVID S. RESNICK, NIXON PEABODY LLP, 100 SUMMER STREET, BOSTON, MA, 02110-2131, US

(73) Assignee: CHILDREN'S MEDICAL CENTER CORPORATION, Boston, MA (US)

(21) Appl. No.: 12/347,411

(22) Filed: Dec. 31, 2008

Related U.S. Application Data
(63) Continuation-in-part of application No. 12/239,386, filed on Sep. 26, 2008.
(60) Provisional application No. 61/018,556, filed on Jan. 2, 2008.

(51) Int. Cl. C12Q 1/68

(52) U.S. Cl. 435/6

(57) ABSTRACT

The present invention provides methods of diagnosing and/or predicting autism spectrum disorder comprising determining the presence of microdeletions and microduplications on chromosomes 15 and 16.

### CROSS REFERENCE TO RELATED APPLICATIONS

[0001] This application is a continuation-in-part of patent application Ser. No. 12/239,386, filed on Sep. 26, 2008, which claims the benefit under 35 U.S.C. § 119(e) of the U.S. Provisional application No. 61/018,556 filed Jan. 2, 2008, the contents of which are incorporated herein by reference in its entirety.

### BACKGROUND OF INVENTION

[0002] Autism spectrum disorder (ASD) is a pervasive developmental disorder that causes severe and pervasive impairment in thinking, feeling, language, and the ability to relate to others. Individuals affected with ASD do not necessary exhibit signs of mental retardation. The onset is generally before the age of 3 years, and is usually first diagnosed in early childhood. ASD can range from a severe form, called autistic disorder, through pervasive development disorder not otherwise specified (PDD-NOS), to a much milder form, Asperger syndrome. ASD also includes two rare disorders, Rett syndrome and childhood disintegrative disorder. ASD has a prevalence of 0.6% in the population, affecting many more boys than girls.

[0003] Currently there is no single best treatment for all children with ASD nor is there a simple diagnosis method for the disorder. One point that expert professionals agree on is that early intervention is important; another is that most individuals with ASD respond well to highly structured, specialized programs. As soon as a child's disability has been identified, it is recommended that the intervention programs should be started. Effective programs teach early communication and social interaction skills. In children younger than 3 years, appropriate interventions usually take place at home or at a child care center. These early intervention programs typically target specific deficits in learning, language, imitation, attention, motivation, compliance, and initiative of interaction. Included are behavioral methods, communication, occupational and physical therapy along with social play interventions.

[0004] Although early intervention has been shown to have a dramatic impact on reducing symptoms and increasing a child's ability to grow and learn new skills, it is estimated that only 50 percent of children are diagnosed before kindergarten. Currently there is no method of early diagnosis and/or predictive method for autism. Parents are usually the first to notice unusual behaviors in their child. In some cases, the baby seemed “different” from birth, unresponsive to people or focusing intently on one item for long periods of time. The first signs of an autism spectrum disorder can also appear in children who had been developing normally. When an affectionate, babbling toddler suddenly becomes silent, withdrawn, self-abusive, or indifferent to social overtures, something is wrong.

[0005] Twin and family studies have estimated the heritability of autism as being up to 90%, making it one of the most heritable complex disorders. Rare genetic syndromes and known chromosomal anomalies explain roughly 10% of cases of autism, including Fragile X, tuberous sclerosis, Smith-Lemli-Opitz syndrome, and maternally-inherited duplications of the Prader-Willi/Angelman syndrome region (15q11-13). However, despite high heritability, genetic studies to date have not provided substantial insight into the 90% of autism with idiopathic etiology.

[0006] Therefore, there is a need for an early diagnosis method and also methods of predicting whether a fetus, an infant or an individual is at risk of developing autism.

### SUMMARY OF THE INVENTION

[0007] Embodiments of the invention are based on the discovery that there are certain genomic imbalances that are associated with autism spectrum disorder (ASD). The inventors have identified regions of rare copy-number variation in families with autism and observed an association between a microdeletion on chromosome 16 (and the inherited reciprocal duplication) (on locus 16p11.2) and autism and ASD. Without wishing to be bound by a theory, both the deletion (about 546-593 kb, in the 29.5 Mb-31.1 Mb region) and the duplication are likely to be mediated by the 147-kb segmental duplication flanking the deleted sequence or reciprocal duplication. In addition, microdeletions and/or microduplications were observed on chromosome 15 (locus 15q13.2q13.3, BP4-BP5) that are associated with individuals affected with autism and ASD. The microdeletions and/or microduplications on chromosome 15 (locus 15q13.2q13.3, BP4-BP5) range from about 0.5 Mb to about 2.0 Mb in size.

[0008] Accordingly, in one embodiment, provided herein is a method for diagnosing ASD and/or autism in an individual, the method comprising the steps of: (a) detecting a microdeletion on chromosome 16p11.2; and (b) detecting a segmental duplication on chromosome 16p11.2; wherein the presence of a about 500 kb microdeletion that is flanked by a about 100 kb segmental duplication on chromosome 16p11.2 in the genome of the individual is indicative that the individual is likely affected with ASD and/or autistic. In one embodiment, the microdeletion and segmental duplication on chromosome 16p11.2 occurs between 29.5 Mb-31.1 Mb region.

[0009] In some embodiments, the microdeletion on chromosome 16p11.2 is between 500-600 kb. In one embodiment, the microdeletion on chromosome 16p11.2 is 546 kb. In another embodiment, the microdeletion on chromosome 16p11.2 is 593 kb. In some embodiments, the microdeletion on chromosome 16p11.2 involves the deletion of any of the genes selected from the group consisting of: BOLA2, GIYD1/2, SULTI1A3/4, SPN, QPRT, c16orf54, KIF22, AMZ, PRRT2, c16orf53, MVP, CDIPT, SEZ6L2, ASPHD1, KCTD13, LOC124446, HIRIP3, CCDC95, DOC2A, FAM57B, ALDOA, PPP4C, YPEL3, GDPD3, MAPK3, CORO1A, TAOK2, and TBX6.

[0010] In one embodiment, the segmental duplication that flanks the about 500 kb microdeletion on chromosome 16p11.2 is 147 kb.

[0011] In another embodiment, provided herein is a method for diagnosing ASD and/or autism in an individual, the method comprising detecting a microduplication on chromosome 15q13.2q13.3 wherein the presence of a about 0.500 Mb or larger microduplication on chromosome 15q13.2q13.3 in the genome of the individual is indicative that the individual is likely affected with ASD and/or autism. In one embodiment, the microduplication on chromosome 15q13.2q13.3 occurs between BP4-BP5 region. In some embodiments, the microduplication is between about 0.500 Mb to about 2 Mb long.

[0012] In one embodiment, provided herein is a method for diagnosing ASD and/or autism in an individual, the method comprising detecting a microdeletion on chromosome 15q13.2q13.3 wherein the presence of a about 0.500 Mb or larger microdeletion on chromosome 15q13.2q13.3 in the genome of the individual indicates that the individual is indicative that the individual is likely affected with ASD and/or autism. In one embodiment, the microdeletion on chromosome 15q13.2q13.3 occurs between BP4-BP5 region. In one embodiment, the microdeletion is between about 0.500 Mb to about 2 Mb long.

[0013] In some embodiments, the microdeletion or microduplication on chromosome 15q13.2q13.3, BP4-BP5 involves the deletion or duplication of any of the genes selected from the group consisting of: MTMR15, MTMR10, TRPM1, KLF13, OTUD7A, has-mir-211 and CHRNA7.

[0014] In one embodiment, the detection is performed using an oligonucleotide-based array comparative genomic hybridization (oligonucleotide-based CGH). The oligonucleotide-based array should have oligonucleotides covering any of these genes: BOLA2, GIYD1/2, SULTI1A3/4, SPN, QPRT, c16orf54, KIF22, AMZ, PRRT2, c16orf53, MVP, CDIPT, SEZ6L2, ASPHD1, KCTD13, LOC124446, HIRIP3, CCDC95, DOC2A, FAM57B, ALDOA, PPP4C, YPEL3, GDPD3, MAPK3, CORO1A, TAO K2, TBX6, MTMR15, MTMR10, TRPM1, KLF13, OTUD7A and CHRNA7.

[0015] In one embodiment, the detection is performed using a bacterial artificial chromosome-based array comparative genomic hybridization (BAC-based CGH).

[0016] In one embodiment, the detection is performed using a fluorescence in situ hybridization (FISH).

[0017] In one embodiment, the detection is performed using an multiplex ligation-dependent probe amplification (MLPA). MLPA probes designed for these genes: BOLA2, GIYD1/2, SULTI1A3/4, SPN, QPRT, c16orf54, KIF22, MAZ, PRRT2, c16orf53, MVP, CDIPT, SEZ6L2, ASPHD1, KCTD13, LOC124446, HIRIP3, CCDC95, DOC2A, FAM57B, ALDOA, PPP4C, YPEL3, GDPD3, MAPK3, CORO1A, TAO K2, TBX6, MTMR15, MTAR10, TRPM1, KLF13, OTUD7A, has-mir-211 and CHRNA7 are used.

### BRIEF DESCRIPTION OF THE DRAWINGS

[0018] FIG. 1 shows the chromosome view of array CGH results showing a terminal deletion on 2q37.3. The arrow points to the targets with a downward-shifted log₂ ratio.

[0019] FIGS. 2A-2C demonstrates the oligonucleotide-array CGH detection of a heterozygous genomic deletion of three consecutive probes covering a minimal 23-kb interval. FIG. 2A shows the deletion of three consecutive targets (underlined with rectangular bar) which was confirmed by dye-swap array CGH. Note the symmetrical opposite ratios between forward-labeled (downward-shift) and reverse-labeled (upward-shift) array CGH. FIG. 2B shows that the 244K whole-genome oligonucleotide-array CGH confirmation of the deletion. The rectangular bar underlines the deleted region. Note the entire CARKL gene deletion and the partial CTNS gene deletion (forward labeling only). FIG. 2C shows that the multiplex ligation-dependent probe amplification (MLPA) confirmation of the deletion. The trace in lighter gray is a sample from a healthy control individual; the trace in darker gray is the patient sample. The dosage of CTNS exons 2 and 6 appears reduced by half (underlined with the rectangular bar), whereas the dosage of CTNS exon 12 is unchanged. FIG. 2D shows that the a segment of the sequencing trace around the deletion junction of the common European deletion. One base (C) overlaps.

[0020] FIG. 3A-3C shows the regions of microdeletion and microduplication on Chromosome 16p11.2. FIG. 3A shows normalized intensity data that are averaged every 11 to 12 probes across a 2-Mb region on chromosome 16. Means (closed circles) and standard deviations (vertical bars) for subjects with normal copy numbers are shown; subjects with duplication are denoted with open circles, and those with deletions are denoted with triangles. Annotated genes in the region of interest are shown (not to scale), with gray denoting brain expression and black denoting unknown or little brain expression. Arrows represent the segmental duplications mediating the rearrangements, with three genes located within the segmental duplication. FIG. 3B shows both the deletion and duplication graphs showing shifted overlaying of two traces of multiplex ligation-dependent probe amplification (MLPA). Black tracings in both graphs represent a normal control sample. In the deletion graph, grey tracings show a sample with a 16p11.2 deletion; in the duplication graph, grey tracings show a sample with a 16p11.2 duplication. The MLPA profiles were generated by ABI 3730 Genetic Analyzer and normalized by GENEMARKER software (SoftGenetics). The four amplicons that are underlined with a black bar and shown with arrows are from probes located within the imbalanced 16p11.2 region. Amplicons labeled with C are control probes located either on chromosome 16 but outside the imbalanced region or on other chromosomes. FIG. 3C shows the oligo array CGH data from one clinical sample with the same chromosome 16p11.2 deletion and parents screened by a 244K whole genome array CGH platform at Children's Hospital Boston. On this scale, zero indicates that reference and test sample have equal copy number, below zero indicates that the Cy5 labeled sample has decreased copy number, and above zero indicates that the Cy5 labeled sample has increased copy number.

[0021] FIG. 4 show additional chromosomal analyses. Top panel shows an ideogram of proximal chromosome 15q (15q11q14) shows the PWS/AS region and the more distal 15q13.2q13.3 region between BP4 and BP5. Lower panel shows scatter plots of array CGH data for a deletion of about 1.5 Mb superimposed with dye-swap scatter plot (note the mirrored distribution of spots). The lower scatter plot represents a duplication of about 500 Kb within the BP4-BP5 interval. The relative positions of 7 genes (6 reference genes and one miRNA gene) are shown in the bottom panel (grey bars). The 1.5 Mb deletions (chr15:28.719-30.232 Mb; hg18) include all 7 genes, while the 500 kb duplications (chr15:28.902-29.404 Mb; hg18) contain 4 genes (MTMR15, MTMR10, TRPM1 and hsa-mir-211) within the BP4-BP5 at chromosome 15q13.2q13.3.

[0022] FIG. 5 summarizes the 15q13.2q13.3 del/dup MLPA and shows the results of MLPA for patient 1 with deletion. Top panel is overlapping MLPA traces for case (lighter traces) and control (darker traces) samples. Bottom panel is a histogram of normalized peak height for probes located within the imbalanced 15q13.2q13.3 region (arrows), probes on chromosome 15 outside the imbalance interval (unlabelled black bars), and control probes located on other chromosomes (C).

[0023] FIG. 6 shows a brief outline of multiplex ligation-dependent probe amplification (MLPA) assay.

### BRIEF LISTING OF THE TABLES

[0024] Table 1 shows the genomic imbalance identified in clinical samples by oligonucleotide-array CGH and confirmed with alternative methods.

[0025] Table 2 shows the genomic coverage with Oligo Array CGH (CHB Version 1.0).

[0026] Table 3 shows the genomic imbalance (GI) detected in validation samples and comparison between oligonucleotide array results and alternate methods of detection

[0027] Table 4 shows the detection of 16p11.2 copy-number variants according to sample.

[0028] Table 5 shows the duplication of chromosome 15q11-13 in AGRE sample.

[0029] Table 6 shows the phenotypic data in AGRE families and Iceland probands with copy number variants at 16p1 1.2. Family structure and ADI-R and ADOS subscores, as well as performance measures are given for AGRE families and Iceland probands with copy number variants at 16p1 1.2.

[0030] Table 7 shows the previously reported CNVs in ASD and/or autism. Events featured in the main tables or text of recent studies evaluating copy number in ASD and/or autism. For each reported event, events observed in the data with substantial overlap were included, and for inherited events, the number transmitted: not transmitted for affected offspring with data were also included. The current sample has some overlap with previously reported samples; * indicates a reported event in an overlapping sample which was also detect in this study. **, event not featured in the main text or tables of the paper, but listed in the supplementary table in an overlapping sample.

[0031] Table 8 shows the clinical information for Children's Hospital deletion cases (Pt#) and Iceland deletion cases (Aut#). Clinical descriptive information is given for the five subjects in the Children's Hospital Boston sample with deletions at 16p1 1.2, and the two subjects in the Iceland sample with deletions at 16p1 1.2 and clinical data available. The third Iceland subject has a history of seizures, but no other information available.

[0032] Table 9 shows the clinical information for Children's Hospital duplication cases. Clinical descriptive information is given for the four subjects in the Children's Hospital Boston sample with duplication at 16p1 1.2.

[0033] Table 10 shows the Iceland phenotype information. Clinical diagnosis by ICD-10 category and transmission information is listed for the Icelandic ASD and/or autism samples with deletions at 16p11.2.

[0034] Table 11 shows the chromosome 15q13.2q13.3 BP4-BP5 microduplications and microdeletions in individuals with ASD and/or autism.

[0035] Table 12 shows the multiplex ligation-dependent probe amplification (MLPA) probes for identifying microduplications and microdeletions at chromosome 15q13.2q13.3 BP4-BP5 and 16p11.2 loci.

### DETAILED DESCRIPTION OF THE INVENTION

[0036] Embodiments of the invention are based upon a discovery of several genomic imbalances on chromosomes 15 and 16 of human subjects that have been diagnosed with autism spectrum disorder (ASD) and/or autism. The genomic imbalances are microdeletions and microduplications on chromosomes 15 and 16 of such subjects.

[0037] The inventors found a recurrent microdeletion at chromosome 16, more precisely at 16p11.2, in at least five human individuals diagnosed with ASD and/or autism. The microdeletion involves about 593 kilo-bases (kb) deletion within the 29.5 Mb-31.1 Mb region which is also flanked on both side with a segmental duplication of about 147 kb. The recurrent 16p11.2 microdeletion is also confirmed in five clinical samples of children with autism spectrum disorder. The sizes of the microdeletions ranged from about 455 kb to about 593 kb.

[0038] For other individuals diagnosed with ASD and/or autism, the inventors found a recurrent reciprocal microduplication at the same region in chromosome 16, at 16p11.2. Similar to the microdeletions, the reciprocal microduplications are about 500 to about 600 kb long within the 29.5 Mb-31.1 Mb region and are also flanked on both side with a segmental duplication of 147 kp. The recurrent 16p11.2 microduplication was also confirmed in four clinical samples of children with autism spectrum disorder. The sizes of the microduplications ranged from about 544 kb to about 691 kb.

[0039] The proximal portion of chromosome 15q is a well known region of genomic instability that contains many segmental duplications. Recurrent large genomic duplications have been found in the Prader-Willi/Angelman (15q11-q13) region. Deletions at 15q11-q13 that result in Prader-Willi syndrome and Angelman syndrome (PWS/AS) are typically about 4 Mb, and are mediated by repetitive elements with clustered breakpoints (BP) at either of two proximal sites (BP1 and BP2) and one distal site (BP3). Such deletions were not identified in the ASD human subjects.

[0040] Here, the inventors found a recurrent genomic segmental microduplication and/or microdeletion specifically at breakpoints BP4-BP5 of chromosome 15q13.2q13.3 in human individuals diagnosed with ASD and/or autism.

[0041] The inventors analyzed DNA samples from 1,445 unrelated human patients submitted consecutively for clinical array comparative genomic hybridization (CGH) testing at Children's Hospital Boston and DNA samples from 1,441 individuals with ASD and/or autism from 751 families in the Autism Genetic Resource Exchange (AGRE) repository. The microduplications and/or microdeletions at 15q13.2q13.3, BP4-BP5 and 16p11.2 were initially noted in single nucleotide polymorphism (SNP) genotyping which covered regions of known common copy number polymorphism and were then later confirmed by oligonucleotide-based array CGH, and by FISH and multiplex ligation-dependent probe amplification (MLPA) using probes to specific genes found in the microduplications and microdeletions regions.

[0042] Autism Spectrum Disorders (ASD), also known as Pervasive Developmental Disorders (PDDs), cause severe and pervasive impairment in thinking, feeling, language, and the ability to relate to others. These disorders are usually first diagnosed in early childhood and range from a severe form, called autistic disorder, through pervasive development disorder not otherwise specified (PDD-NOS), to a much milder form, Asperger syndrome. They also include two rare disorders, Rett syndrome and childhood disintegrative disorder. It is important to note that these disorders are not necessarily associated with mental retardation (Diagnostic and Statistical Manual of Mental Disorders published by the American Psychiatric Association (DSM-IV, 4^{th} edition)).

[0043] Prevalence studies have been done in several states and also in the United Kingdom, Europe, and Asia. A recent study of a U.S. metropolitan area estimated that 3.4 of every 1,000 children 3-10 years old had ASD and/or autism. This wide range of prevalence points to a need for earlier and more accurate screening for the symptoms of ASD. The earlier the disorder is diagnosed, the sooner the child can be helped through treatment interventions. Pediatricians, family physicians, daycare providers, teachers, and parents may initially dismiss signs of ASD, optimistically thinking the child is just a little slow and will “catch up.” Although early intervention has a dramatic impact on reducing symptoms and increasing a child's ability to grow and learn new skills, it is estimated that only 50 percent of children are diagnosed before kindergarten.

[0044] All children with ASD and/or autism demonstrate deficits in 1) social interaction, 2) verbal and nonverbal communication, and 3) repetitive behaviors or interests. In addition, they will often have unusual responses to sensory experiences, such as certain sounds or the way objects look. Each of these symptoms runs the gamut from mild to severe. They will present in each individual child differently. For instance, a child may have little trouble learning to read but exhibit extremely poor social interaction. Each child will display communication, social, and behavioral patterns that are individual but fit into the overall diagnosis of ASD.

[0045] Children with ASD and/or autism do not follow the typical patterns of child development. In some children, hints of future problems may be apparent from birth. In most cases, the problems in communication and social skills become more noticeable as the child lags further behind other children the same age. Some other children start off well enough. Often times between 12 and 36 months old, the differences in the way they react to people and other unusual behaviors become apparent. Some parents report the change as being sudden, and that their children start to reject people, act strangely, and lose language and social skills they had previously acquired. In other cases, there is a plateau, or leveling, of progress so that the difference between the child with ASD and/or autism and other children the same age becomes more noticeable.

[0046] ASD is defined by a certain set of behaviors that can range from the very mild to the severe.

[0047] ASD has been associated with mental retardation (MR). It is said that between 75% and 90% of all autistics are mentally retarded. However, having ASD and/or autism does not necessarily mean that one will have MR. ASD and/or autism occurs at all IQ levels, from genius levels to the severely learning-disabled.

[0048] According to the Diagnostic and Statistical Manual of Mental Disorders (DSM-IV, 4^{th} edition) that is published by the American Psychiatric Association to provide diagnostic criteria for mental disorders, MR and ASD are diagnosed using different sets of criteria. The essential feature of MR is significant sub-average general intellectual functioning (Criterion A) that is accompanied by significant limitations in adaptive functioning in at least two of the following skill areas: communication, self care, home living, social/interpersonal skills, use of community resources, self-direction, functional academic skills, work, leisure, health, and safety (Criterion B). The onset must occur before 18 years (Criterion C).

[0049] The essential features of ASD are the presence of markedly abnormal or impaired development in social interaction and communication and a markedly restricted repertoire of activity and interest. Below is the list of diagnostic criteria for ASD defined in DSM-IV:

A. A total of six (or more) items from (1), (2), and (3), with at least two from (1), and one of each from (2) and (3):
[0050] (1) quantitative impairment in social interaction, as manifested by at least two of the following:
   [0051] a. marked impairment in the use of multiple nonverbal behaviors such as eye-to-eye gave, facial expression, body posture, and gesture to regulate social interaction
   [0052] b. failure to develop peer relationships appropriate to developmental level
   [0053] c. a lack of spontaneous seeking to share enjoyment, interest, or achievements with other people (e.g. by a lack of showing, bring, or pointing out objects of interest)
   [0054] d. lack of social or emotional reciprocity
[0055] (2) quantitative impairment in communication as manifested by at least two of the following:
   [0056] a. delay in, or total lack of, the development of spoken language (not accompanied by an attempt to compensate through alternative modes of communication such as gesture or mime)
   [0057] b. in individual with adequate speech, marked impairment in the ability to initiate or sustain conversation with others
   [0058] c. stereotype and repetitive use of language or idiosyncratic language
   [0059] d. lack of varied, spontaneous make-believe play or social imitative play appropriate to developmental level
[0060] (3) restrictive repetitive and stereotyped patterns of behavior, interest, and activities, as manifested by at least two of the following:
   [0061] a. encompassing preoccupation with one or more stereotyped and restricted pattern of interest that is abnormal either in intensity or focus
   [0062] b. apparently inflexible adherence to specific, nonfunctional routines or rituals
   [0063] c. stereotyped and repetitive motor mannerism (e.g. hand or finger flapping or twisting, or complex whole-body movements)
   [0064] d. persistent preoccupation with parts of object
      B. Delays or abnormal functioning in at least one of the following areas, with onset prior to age 3 years: (1) social interaction, (2) language use in social communication, or (3) symbolic or imaginative play.
      C. The disturbance is not better accounted for Rett's Disorder or childhood disintegrative disorder.

[0065] Furthermore, there is a distinction between ASD/autism and MR. People with MR generally show even skill development, whereas individuals with ASD and/or autism typically show uneven skill development. Individuals with ASD and/or autism can be very good at certain skills, such as music or mathematical calculation, yet perform poorly in other areas, especially social communication and social interaction. It is important to distinguish ASD and/or autism from mental retardation or other disorders since diagnostic confusion can result in referral to inappropriate and ineffective treatment techniques. It is more accurate to class ASD and/or autism as a developmental disability, and not a mental illness.

[0066] Currently, there is no single test for ASD and/or autism. In evaluating a child, clinicians rely on behavioral characteristics to make a diagnosis, as described above. Some of the characteristic behaviors of ASD and/or autism can be apparent in the first few months of a child's life, or they can appear at any time during the early years. For the diagnosis, problems in at least one of the areas of communication, socialization, or restricted behavior must be present before the age of 3. The diagnosis requires a two-stage process. The first stage involves developmental screening during “well child” check-ups; the second stage entails a comprehensive evaluation by a multidisciplinary team.

[0067] In one embodiment, diagnosis is by the Autism Diagnostic Interview-Revised (ADI-R) (Lord C, et al., 1993, Infant Mental Health, 14:234-52). In another embodiment, diagnosis is by symptoms fitting an AGRE classification of ASD and/or autism, broad spectrum (patterns of impairment along the spectrum of pervasive developmental disorders, including PDD-NOS and Asperger's syndrome).

[0068] Recent studies strongly suggest that some people have a genetic predisposition to developing ASD and/or autism. In families with one autistic child, the risk of having a second child with the disorder is approximately 5 percent, or one in 20. This is greater than the risk for the general population.

[0069] The present discoveries is useful for making a diagnosis as well as a prediction of the probability and/or likelihood of developing ASD.

[0070] Accordingly, provided herein is a method for diagnosing of autism and autism spectrum disorders using genetic analysis to identify the presence of a about 593 kb deletion in chromosome 16p11.2 or a reciprocal duplication within the 29.5 Mb-31.1 Mb region, and the presence of a segmental duplicate sequence of 147 kb flanking the about 593 kb deletion or reciprocal duplication region.

[0071] In addition, provided herein is a method for diagnosing of autism and autism spectrum disorders using genetic analysis to identify the presence of microdeletion or microduplication on chromosome 15 q13.2q13.3, wherein the microdeletion or microduplication can vary in sizes from about 0.500 Mb to about 2.0 Mb long.

[0072] In one embodiment, provided herein is a method for diagnosing ASD and/or autism in an individual, the method comprising the steps of: (a) detecting a microdeletion on chromosome 16p11.2; and (b) detecting a segmental duplication on chromosome 16p11.2; wherein the presence of an about 400-700 kb microdeletion that is flanked by an about 100 kb segmental duplication on chromosome 16p11.2 in the genome of the individual is indicative that the individual is likely affected with ASD and/or autism. The individual is preferably a human.

[0073] In another embodiment, provided herein is a method for diagnosing ASD and/or autism in an individual, the method comprising the steps of: (a) detecting a microduplication on chromosome 16p11.2; and (b) detecting a segmental duplication on chromosome 16p11.2; wherein the presence of an about 400-700 kb microduplication that is flanked by an about 100 kb segmental duplication on chromosome 16p11.2 in the genome of the individual is indicative that the individual is likely affected with ASD and/or autism. The individual is preferably a human.

[0074] In one embodiment, the individual is suspected of having ASD and/or autism. In another embodiment, the individual is asymptomatic but has a family history of ASD

[0075] In one embodiment, the individual is a human. In one embodiment, the individual is a human fetus of at least 10 weeks of gestation. In one embodiment, the individual is a human fetus between 10 weeks of gestation to full term, approximately 38 weeks of gestation.

[0076] Since ASD and/or autism does not necessary occur immediately from birth and can develop later in the life of a child, being able to predict the likelihood that a child can develop the disorder allows the parents and clinician to be more vigilant and be psychologically and medically prepared when the symptoms manifest. Twin studies suggest that ASD and/or autism has a strong genetic component. Parents with one or more autistic children and plan to have additional children can use the methods described herein to screen for the likelihood that any further biological child is predisposed to develop the disorder.

[0077] Accordingly, in one embodiment, provided herein is a method for predicting susceptibility or the likelihood of an individual in developing ASD and/or autism, the method comprising the steps of: (a) detecting a microdeletion on chromosome 16p11.2; and (b) detecting a segmental duplication on chromosome 16p11.2; wherein a presence of an about 400-700 kb microdeletion that is flanked by an about 100 kb segmental duplication on chromosome 16p11.2 in the genome of the individual indicative that the individual is susceptible to or likely to develop ASD and/or autism.

[0078] In another embodiment, provided herein is a method for predicting susceptibility or the likelihood of an individual in developing ASD and/or autism, the method comprising the steps of: (a) detecting a microduplication on chromosome 16p11.2; and (b) detecting a segmental duplication on chromosome 16p11.2; wherein a presence of an about 400-700 kb microduplication that is flanked by an about 100 kb segmental duplication on chromosome 16p11.2 in the genome of the individual indicative that the individual is susceptible to or likely to develop ASD and/or autism.

[0079] In one embodiment, the about 400-700 kb microdeletion or microduplication, and the about 100 kb segmental duplication on chromosome 16p11.2 associated with ASD and/or autism occurs within the 29.5 Mb-30.1 Mb region.

[0080] In one embodiment, the about 400-700 kb microdeletion or microduplication, and the about 100 kb segmental duplication on chromosome 16p11.2 associated with ASD and/or autism occurs within the 29.5 Mb-31.1 Mb region.

[0081] In one embodiment, the about 400-700 kb microdeletion or microduplication, and the about 100 kb segmental duplication on chromosome 16p11.2 associated with ASD and/or autism occurs in region 29,362,092-30,255,393 on chromosome 16 according to the Human Genome Build 18 (Hg 18; March, 2006).

[0082] In one embodiment, the microdeletion at 16p11.2, 29.5 Mb-31.1 Mb region is about 500 kb long. In one embodiment, the microdeletion at 16p11.2, 29.5 Mb-31.1 Mb region is 500 kb long. In some embodiments, the microdeletion is approximately 445 kb, 544 kb, 546 kb, 593 kb or 653 kb long. In some embodiments, the microdeletion is between about 400 kb to about 500 kb long, including all the whole integers between 400 and 500. In some embodiments, the microdeletion is between about 500 kb to about 600 kb long, including all the whole integers between 500 and 600. In some embodiments, the microdeletion is between about 400 kb to about 700 kb long, including all the whole integers between 400 and 700. In some embodiments, the microdeletion is between about 600 kb to about 700 kb long, including all the whole integers between 600 and 700.

[0083] In one embodiment, the about 400-700 kb microdeletion and the about 100 kb segmental duplication on chromosome 16p11.2 associated with ASD and/or autism occurs in region 29,581,455 to 30,027,260 on chromosome 16 according to the Human Genome Build 18 (Hg 18; March, 2006).

[0084] In one embodiment, the about 400-700 kb microdeletion and the about 100 kb segmental duplication on chromosome 16p11.2 associated with ASD and/or autism occurs in region 29,560,500 to 30,104,842 on chromosome 16 according to the Human Genome Build 18 (Hg 18; March, 2006).

[0085] In one embodiment, the about 400-700 kb microdeletion and the about 100 kb segmental duplication on chromosome 16p11.2 associated with ASD and/or autism occurs in region 29,560,500 to 30,106,852 on chromosome 16 according to the Human Genome Build 18 (Hg 18; March, 2006).

[0086] In one embodiment, the about 400-700 kb microdeletion and the about 100 kb segmental duplication on chromosome 16p11.2 associated with ASD and/or autism occurs in region 29,362,092 to 30,015,022 on chromosome 16 according to the Human Genome Build 18 (Hg 18; March, 2006).

[0087] In one embodiment, the microduplication at 16p11.2, 29.5 Mb-31.1 Mb region is about 500 kb long. In one embodiment, the microduplication at 16p11.2, 29.5 Mb-31.1 Mb region is 500 kb long. In some embodiments, the microduplication is approximately 544 kb, 658 kb, or 691 kb long. In some embodiments, the microduplication is between about 500 kb to about 600 kb long, including all the whole integers between 500 and 600. In some embodiments, the microduplication is between about 500 kb to about 700 kb long, including all the whole integers between 500 and 700. In some embodiments, the microduplication is between about 600 kb to about 700 kb long, including all the whole integers between 600 and 700.

[0088] In one embodiment, the about 400-700 kb microduplication and the about 100 kb segmental duplication on chromosome 16p11.2 associated with ASD and/or autism occurs in region 29,560,500 to 30,255,393 on chromosome 16 according to the Human Genome Build 18 (Hg 18; March, 2006).

[0089] In one embodiment, the about 400-700 kb microduplication is a reciprocal microduplication of the microdeletion on the same region in chromosome 16p11.2 that is mediated by the segmental duplications that are also found in the flanking either the microduplications or microdeletions.

[0090] In one embodiment, the about 400-700 kb microduplication and the about 100 kb segmental duplication on chromosome 16p11.2 associated with ASD and/or autism occurs in region 29,581,455 to 30,240,082 on chromosome 16 according to the Human Genome Build 18 (Hg 18; March, 2006).

[0091] In one embodiment, the about 400-700 kb microduplication and the about 100 kb segmental duplication on chromosome 16p11.2 associated with ASD and/or autism occurs in region 29,560,500 to 30,255,393 on chromosome 16 according to the Human Genome Build 18 (Hg 18; March, 2006).

[0092] In one embodiment, the about 400-700 kb microduplication and the about 100 kb segmental duplication on chromosome 16p11.2 associated with ASD and/or autism occurs in region 29,560,500 to 30,104,842 on chromosome 16 according to the Human Genome Build 18 (Hg 18; March, 2006).

[0093] As used herein, the term “about” refers to a range of 1% to 3% more or less of the length of a sequence described herein. For example, about 500 kb long refers to a range of 1% to 3% more of 500 kb, or 1% to 3% less of 500 kb. All ranges between 1% and 3% including decimals of 1% and 3% are included herein, for example, 1%, 2%, 3%, 1.3%, 1.7%, 2.2%, 2.7% etc.

[0094] In one embodiment, the microdeletions or reciprocal microduplications at 16p11.2, 29.5 Mb-31.1 Mb region, are flanked by segmental duplications of about 100 kb long. In one embodiment, the flanking segmental duplication is 100 kb long. In another embodiment, the segmental duplication is about 147 kb long. In some embodiments, the segmental duplication is between about 100 to about 147 kb long, including all the whole integers between 100 and 147.

[0095] In another embodiment, the microduplication is 147 kb long. In some embodiments, the microduplication is between 100 to 147 kb long, including all the whole integers between 100 and 147.

[0096] In one embodiment, the flanking segmental duplication is surrounding or within the region 29,368,017 to 29,514,353 (147 kb segmental duplication at the left site of the about 400-700 kb microdeletion or microduplication); and the second segmental duplication occurs surrounding or within 30,107 356 to 30,254,369 (147 kb segmental duplication at the right site of the about 400-700 kb microdeletion or microduplication) on chromosome 16 according to the Human Genome Build 18 (Hg 18; March, 2006).

[0097] In one embodiment, the DNA sequence of the 147 kb duplication is chr16:29368017-29514353 of the Human Genome Build 18 (Hg 18; March, 2006) (SEQ. ID. No. 54). In another embodiment, the DNA sequence of the 147 kb duplication is chr16:30107356-30254369 of the Human Genome Build 18 (Hg 18; March, 2006) (SEQ. ID No. 55). In other embodiments, the DNA sequence of the 147 kb duplication is at least 90%, at least 91%, at least 92%, at least 93%, at least 94%, at least 95%, at least 96%, at least 97%, at least 98%, or at least 99%, including to the decimals of percentages between 90%-100%, homologous to SEQ. ID. No. 54 or 55.

[0098] In one embodiment, the microdeletion or reciprocal microduplication at 16p11.2, 29,362,092-33,255,393 region comprises at least one, two, three, four, five, six, seven, eight, nine, ten, 11, 12, 13, 14, 15, 16, 17, 18, 19, 20, 21, 22, 23, 24, 25, 26, 27, or 28 of the following genes: BOLA2 (mRNA Genbank Accession No. NM_{—}001031827.1), GIYD1/2 (mRNA Genbank Accession No. NM_{—}001014999; NM_{—}001015000.1), SULTI1A3/4 (mRNA Genbank Accession No. NM_{—}003166.3; NM_{—}177552.2), SPN (mRNA Genbank Accession No. NM_{—}003123), QPRT (mRNA Genbank Accession No. NM_{—}014298.3), c16orf54 (mRNA Genbank Accession No. NM_{—}175900.3), KIF22 (mRNA Genbank Accession No. NM_{—}007317.1), AMZ (mRNA Genbank Accession No. NM_{—}003123), PRRT2 (mRNA Genbank Accession No. NM_{—}145239.2), c16orf53 (mRNA Genbank Accession No. NM_{—}024516.3), MVP (mRNA Genbank Accession No. NM_{—}005115.3; NM_{—}017458.2), CDIPT (mRNA Genbank Accession No. NM_{—}006319.3), SEZ6L2 (mRNA Genbank Accession Nos. NM_{—}001114099.1; NM_{—}001114100.1; NM_{—}012410.2; NM_{—}201575.2), ASPHD1 (mRNA Genbank Accession No. NM_{—}181718.3), KCTD13 (mRNA Genbank Accession No. NM_{—}178863.2), LOC124446 (mRNA Genbank Accession No. NM_{—}001083613.1; NM_{—}194280.3), HIRIP3 (mRNA Genbank Accession No. NM_{—}003609.2), CCDC95 (mRNA Genbank Accession No. NM_{—}173618.1), DOC2A (mRNA Genbank Accession No. NM_{—}003586.2), FAM57B (mRNA Genbank Accession No. NM_{—}031478.4), ALDOA (mRNA Genbank Accession No. NM_{—}000034.2; NM_{—}001127617.1; NM_{—}184041.1; NM_{—}184043.1), PPP4C (mRNA Genbank Accession No. NM_{—}002720.1), YPEL3 (mRNA Genbank Accession No. NM_{—}031477.4), GDPD3 (mRNA Genbank Accession No. NM_{—}024307.2)), AMPK3 (mRNA Genbank Accession No. NM_{—}001040056.1; NM_{—}001109891.1; NM_{—}002746.2), CORO1A (mRNA Genbank Accession No. NM_{—}007074.2), TAO K2 (mRNA Genbank Accession No. NM_{—}003123), and TBX6 (mRNA Genbank Accession No. NM_{—}003123) (See FIG. 3A).

[0099] In one embodiment, the microdeletion or reciprocal microduplication at 16p11.2, 29,362,092-33,255,393 region consists of at least one, two, three, four, five, six, seven, eight, nine, ten, 11, 12, 13, 14, 15, 16, 17, 18, 19, 20, 21, 22, 23, 24, 25, 26, 27, or 28 of the following genes: BOLA2 (mRNA Genbank Accession No. NM_{—}001031827.1), GIYD1/2 (mRNA Genbank Accession No. NM_{—}001014999; NM_{—}001015000.1), SULTI1A3/4 (mRNA Genbank Accession No. NM_{—}003166.3; NM_{—}177552.2), SPN (mRNA Genbank Accession No. NM_{—}003123), QPRT (mRNA Genbank Accession No. NM_{—}014298.3), c16orf54 (mRNA Genbank Accession No. NM_{—}175900.3), KIF22 (mRNA Genbank Accession No. NM_{—}007317.1), MAZ (mRNA Genbank Accession No. NM_{—}003123), PRRT2 (mRNA Genbank Accession No. NM_{—}145239.2), c16orf53 (mRNA Genbank Accession No. NM_{—}024516.3), MVP (mRNA Genbank Accession No. NM_{—}005115.3; NM_{—}017458.2), CDIPT (mRNA Genbank Accession No. NM_{—}006319.3), SEZ6L2 (mRNA Genbank Accession Nos. NM_{—}001114099.1; NM_{—}001114100.1; NM_{—}012410.2; NM_{—}201575.2), ASPHD1 (mRNA Genbank Accession No. NM_{—}181718.3), KCTD13 (mRNA Genbank Accession No. NM_{—}178863.2), LOC124446 (mRNA Genbank Accession No. NM_{—}001083613.1; NM_{—}194280.3), HIRIP3 (mRNA Genbank Accession No. NM_{—}003609.2), CCDC95 (mRNA Genbank Accession No. NM_{—}173618.1), DOC2A (mRNA Genbank Accession No. NM_{—}003586.2), FAM57B (mRNA Genbank Accession No. NM_{—}031478.4), ALDOA (mRNA Genbank Accession No. NM_{—}000034.2; NM_{—}001127617.1; NM_{—}184041.1; NM_{—}184043.1), PPP4C (mRNA Genbank Accession No. NM_{—}002720.1), YPEL3 (mRNA Genbank Accession No. NM_{—}031477.4), GDPD3 (mRNA Genbank Accession No. NM_{—}024307.2)), MAPK3 (mRNA Genbank Accession No. NM_{—}001040056.1; NM_{—}001109891.1; NM_{—}002746.2), CORO1A (mRNA Genbank Accession No. NM_{—}007074.2), TAO K2 (mRNA Genbank Accession No. NM_{—}003123), and TBX6 (mRNA Genbank Accession No. NM_{—}003123) (See FIG. 3A).

[0100] In one embodiment, the microdeletion or reciprocal microduplication at 16p11.2, 29,362,092-33,255,393 region consists essentially of at least one, two, three, four, five, six, seven, eight, nine, ten, 11, 12, 13, 14, 15, 16, 17, 18, 19, 20, 21, 22, 23, 24, 25, 26, 27, or 28 of the following genes: BOLA2 (mRNA Genbank Accession No. NM_{—}001031827.1), GIYD1/2 (mRNA Genbank Accession No. NM_{—}001014999; NM_{—}001015000.1), SULTI1A3/4 (mRNA Genbank Accession No. NM_{—}003166.3; NM_{—}177552.2), SPN (mRNA Genbank Accession No. NM_{—}003123), QPRT (mRNA Genbank Accession No. NM_{—}014298.3), c16orf54 (mRNA Genbank Accession No. NM_{—}175900.3), KIF22 (mRNA Genbank Accession No. NM_{—}007317.1), MAZ (mRNA Genbank Accession No. NM_{—}003123), PRRT2 (mRNA Genbank Accession No. NM_{—}145239.2), c16orf53 (mRNA Genbank Accession No. NM_{—}024516.3), MVP (mRNA Genbank Accession No. NM_{—}005115.3; NM_{—}017458.2), CDIPT (mRNA Genbank Accession No. NM_{—}006319.3), SEZ6L2 (mRNA Genbank Accession Nos. NM_{—}001114099.1; NM_{—}001114100.1; NM_{—}012410.2; NM_{—}201575.2), ASPHD1 (mRNA Genbank Accession No. NM_{—}181718.3), KCTD13 (mRNA Genbank Accession No. NM_{—}178863.2), LOC124446 (mRNA Genbank Accession No. NM_{—}001083613.1; NM_{—}194280.3), HIRIP3 (mRNA Genbank Accession No. NM_{—}003609.2), CCDC95 (mRNA Genbank Accession No. NM_{—}173618.1), DOC2A (mRNA Genbank Accession No. NM_{—}003586.2), FAM57B (mRNA Genbank Accession No. NM_{—}031478.4), ALDOA (mRNA Genbank Accession No. NM_{—}000034.2; NM_{—}001127617.1; NM_{—}184041.1; NM_{—}184043.1), PPP4C (mRNA Genbank Accession No. NM_{—}002720.1), YPEL3 (mRNA Genbank Accession No. NM_{—}031477.4), GDPD3 (mRNA Genbank Accession No. NM_{—}024307.2)), MAPK3 (mRNA Genbank Accession No. NM_{—}001040056.1; NM_{—}001109891.1 NM_{—}002746.2), CORO1A (mRNA Genbank Accession No. NM_{—}007074.2), TAO K2 (mRNA Genbank Accession No. NM_{—}003123), and TBX6 (mRNA Genbank Accession No. NM_{—}003123) (See FIG. 3A).

[0101] In one embodiment, the microdeletion or reciprocal microduplication at 16p11.2, 29,362,092-33,255,393 region comprises all these four genes: SPN, MAZ, TAO K2, and TBX6.

[0102] In one embodiment, the microdeletion or reciprocal microduplication at 16p11.2, 29,362,092-33,255,393 region consists of all these four genes: SPN, MAZ, TAO K2, and TBX6.

[0103] In one embodiment, the microdeletion or reciprocal microduplication at 16p11.2, 29,362,092-33,255,393 region consists essentially of all these four genes: SPN, MAZ, TAO K2, and TBX6.

[0104] A skilled artisan in the art will be able to design oligonucleotide probes for use in the various detection methods known in the art, e.g. FISH, MLPA, oligonucleotide-based array CGH, to detect the deletion or duplication of these genes in the genomic DNA (nucleic acid sample) of the individual tested.

[0105] SPN (mRNA Genbank Accession No. NM_{—}003123) is sialophorin (genomic Genbank Accession no. NC_{—}000016.8, GI:51511732; Region: 29581801-29589329; GenomeProject:168; Ensembl:ENSG00000197471) (SEQ. ID. No. 43). Sialophorin (leukosialin) is a major sialoglycoprotein on the surface of human T lymphocytes, monocytes, granulocytes, and some B lymphocytes, which appears to be important for immune function and may be part of a physiologic ligand-receptor complex involved in T-cell activation. This gene can be found on Chromosome 16 at location 29,581,801-29,589,312. The start of this gene is located in Contig AC009086.6.1.201155.

[0106] MAZ (mRNA Genbank Accession No. NM_{—}002383) is MYC-associated zinc finger protein (purine-binding transcription factor). Synonyms: Pur-1, ZF87, Zif87, ZNF801. (genomic Genbank Accession no. NC_{—}000016.8 GI:51511732; Region: 29725356-29730005; GenomeProject:168; Ensembl:ENSG00000103495) (SEQ. ID. No. 44). This gene can be found on Chromosome 16 at location 29,725,356-29,730,003. The start of this gene is located in Contig AC009133.7.1.174363.

[0107] TAO K2 (mRNA Genbank Accession No. NM_{—}016151) is TAO kinase 2 which is also known as PSK; PSK1; TAO1; TAO2; MAP3K17; KIAA0881; Serine/threonine-protein kinase TAO2 (EC 2.7.11.1); Thousand and one amino acid protein 2; Prostate-derived STE20-like kinase 1, (PSK-1); and Kinase from chicken homolog C, (hKFC-C). (Genomic Genbank Accession no. NC_{—}000016.8 GI:51511732; Region: 29892723-29911082; GenomeProject: 168; Ensembl:ENSG00000149930) (SEQ. ID. No. 45). This gene can be found on Chromosome 16 at location 29,892,723-33,861,588. The start of this gene is located in Contig AC093512.2.1.157481.

[0108] TBX6, T-box transcription factor (T-box protein 6), (mRNA Genbank Accession No. NM_{—}004608; NM_{—}080758) is a member of a phylogenetically conserved family of genes that share a common DNA-binding domain, the T-box. T-box genes encode transcription factors that are involved in the regulation of developmental processes. Knockout studies in mice indicate that this gene is important for specification of paraxial mesoderm structures. It is also known as T-box 6 or DFNB67. (Genomic Genbank Accession no. NC_{—}000016.8 GI:51511732; Region: complement (30004583-30010709); GenomeProject: 168; Ensembl:ENSG00000149922) (SEQ. ID. No. 46). This gene can be found on Chromosome 16 at location 30,004,583-30,010,709. The start of this gene is located in Contig AC012645.7.1.192943.

[0109] BOLA2 (mRNA Genbank Accession No. NM_{—}001031827.1) is BolA-like protein 2. It is also known as My016 and BOLA2A. BolA-like proteins are widely conserved from prokaryotes to eukaryotes, and these proteins seem to be involved in cell proliferation or cell-cycle regulation. BOLA2 is a member of the BolA Super-family. This family consist of the morphoprotein BolA from E. coli and its various homologues. In E. coli, over expression of this protein causes round morphology and may be involved in switching the cell between elongation and septation systems during cell division. The expression of BolA is growth rate regulated and is induced during the transition into the stationary phase. BolA is also induced by stress during early stages of growth and may have a general role in stress response. It has also been suggested that BolA can induce the transcription of penicillin binding proteins 6 and 5. This gene is located within a region of a segmental duplication on chromosome 16p. (Genomic Genbank Accession no. NC_{—}000016.8 GI:51511732; Region: complement (29,362,071-29,373,786); GenomeProject:168; Ensembl:ENSG00000183336) (SEQ. ID. No. 56). This gene can be found on Chromosome 16 at location 30,004,583-30,010,709.

[0110] GIYD1/2 (mRNA Genbank Accession No. NM_{—}001014999.1; NM_{—}001015000.1) is GIY-YIG domain containing 1 isoform 1 and isoform 2 protein. It is also known as GIYD1. This isoform 1 is the longer isoform. The GIY-YIG catalytic domain is found in the amino terminal region of excinuclease abc subunit c (uvrC), bacteriophage T4 endonucleases segA, segB, segC, segD and segE; it is also found in putative endonucleases encoded by group I introns of fungi and phage. A segmental duplication of the p arm of chromosome 16 created two identical copies of the GIY-YIG domain containing gene, this record represents the more centromeric copy. Exons of this gene overlap with exons of the phenol-preferring sulfotransferase (SULT1A3) gene. Two transcript variants that encode different protein isoforms have been identified through sequence analysis. (Genomic Genbank Accession no. NC_{—}000016.8 GI:51511732; Region: complement (30,112,718-30,116,383); GenomeProject:168; Ensembl:ENSG00000132207) (SEQ. ID. No. 57). This gene can be found on Chromosome 16 at location 30,004,583-30,010,709.

[0111] SULTI1A3/4 (mRNA Genbank Accession No. NM_{—}003166.3; NM_{—}177552.2) is sulfotransferase family, cytosolic, 1A, phenol-preferring, member 3. It is also known as HAST, HAST3, M-PST, MGC117469, ST1A5, STM, SULT1A4, and TL-PST. Sulfotransferase enzymes catalyze the sulfate conjugation of many hormones, neurotransmitters, drugs, and xenobiotic compounds. These cytosolic enzymes are different in their tissue distributions and substrate specificities. The gene structure (number and length of exons) is similar among family members. This gene encodes a phenol sulfotransferase with thermolabile enzyme activity. Four sulfotransferase genes are located on the p arm of chromosome 16; this gene and SULT1A4 arose from a segmental duplication. This gene is the most centromeric of the four sulfotransferase genes. Exons of this gene overlap with exons of a gene that encodes a protein containing GIY-YIG domains (GIYD1). Multiple alternatively spliced variants that encode the same protein have been described. (Genomic Genbank Accession no. NC_{—}000016.8 GI:51511732; Region: complement (30,113,244-30,123,151); GenomeProject: 168; Ensembl:ENSG00000213599) (SEQ. ID. No. 58).

[0112] QPRT (mRNA Genbank Accession No. NM_{—}014298.3) is quinolinate phosphoribosyltransferase, a key enzyme in catabolism of quinolinate, an intermediate in the tryptophan-nicotinamide adenine dinucleotide pathway. It is also is involved in the de novo synthesis of NAD in both prokaryotes and eukaryotes. Quinolinate acts as a most potent endogenous exitotoxin to neurons. Elevation of quinolinate levels in the brain has been linked to the pathogenesis of neurodegenerative disorders such as epilepsy, Alzheimer's disease, and Huntington's disease. It is also known as QPRTase and nicotinate-nucleotide pyrophosphorylase. (Genomic Genbank Accession no. NC_{—}000016.8 GI:51511732; Region: complement (29,597,942-29,616,816); GenomeProject:168; Ensembl:ENSG00001103485) (SEQ. ID. No. 59).

[0113] C16orf54 (mRNA Genbank Accession No. NM_{—}175900.3) is human chromosome 16 open reading frame 54. It is also known as FLJ35681, MGC129957, MGC129958, and hypothetical protein LOC283897. (Genomic Genbank Accession no. NC_{—}000016.8 GI:51511732; Region: complement (29,661,285-29,664,841); GenomeProject:168; Ensembl:ENSG00000185905) (SEQ. ID. No. 60).

[0114] KIF22 (mRNA Genbank Accession No. NM_{—}007317.1) is kinesin family member 22. It is also known as KID, KNSL4, OBP, OBP-1, OBP-2, kinesin-like 4, and oriP binding protein and origin of plasmid DNA replication-binding protein. It is a member of kinesin-like protein family. This protein family are microtubule-dependent molecular motors that transport organelles within cells and move chromosomes during cell division. The C-terminal half of this protein has been shown to bind DNA. Studies with the Xenopus homolog suggests its essential role in metaphase chromosome alignment and maintenance. (Genomic Genbank Accession no. NC_{—}000016.8 GI:51511732; Region: complement (29,709,559-29,724,207); GenomeProject:168; Ensembl: ENSG00000079616) (SEQ. ID. No. 61).

[0115] PRRT2 (mRNA Genbank Accession No. NM_{—}145239.2) is proline-rich transmembrane protein 2. It is also known as DKFZp547J199 and FLJ25513. (Genomic Genbank Accession no. NC_{—}000016.8 GI:51511732; Region: complement (29,730,910-29,734,703); GenomeProject: 168; Ensembl: ENSG00000167371) (SEQ. ID. No. 62).

[0116] C16orf53 (mRNA Genbank Accession No. NM_{—}024516.3) is human chromosome 16 open reading frame 53. C16ORF53 (PA1) is a component of a Set1-like multiprotein histone methyltransferase complex. It is also known as FLJ22459, MGC4606, PA1, and PTIP-associated 1 protein. (Genomic Genbank Accession no. NC_{—}000016.8 GI:51511732; Region: complement (29,735,029-29,741,317); GenomeProject:168; Ensembl: ENSG00000185928) (SEQ. ID. No. 63).

[0117] MVP (mRNA Genbank Accession No. NM_{—}005115.3; NM_{—}017458.2) is major vault protein which is a lung resistance-related protein. Vaults are multi-subunit structures that may be involved in nucleo-cytoplasmic transport. This protein mediates drug resistance, perhaps via a transport process. It is widely distributed in normal tissues, and overexpressed in multidrug-resistant cancer cells. The protein overexpression is a potentially useful marker of clinical drug resistance. This gene produces two transcripts by using two alternative exon 2 sequences; however, the open reading frames are the same in both transcripts. It is also known as LRP and VAULT1 (Genomic Genbank Accession no. NC_{—}000016.8 GI:51511732; Region: complement (29,731,591-29,766,842); GenomeProject:168; Ensembl: ENSG00000013364) (SEQ. ID. No. 64).

[0118] CDIPT (mRNA Genbank Accession No. NM_{—}006319.3) is CDP-diacylglycerol-inositol 3-phosphatidyltransferase (phosphatidylinositol synthase). It is involved in the biosynthesis of phosphatidylinositol. Phosphatidylinositol synthase, a member of the CDP-alcohol phosphatidyl transferase class-I family, is an integral membrane protein found on the cytoplasmic side of the endoplasmic reticulum and the Golgi apparatus. It is also known as MGC1328, PIS, PIS1, CDP-diacylglycerol-inositol 3-phosphatidyltransferase, PI synthase, and PtdIns synthase. (Genomic Genbank Accession no. NC_{—}000016.8 GI:51511732; Region: complement (29,777,179-29,782,079); GenomeProject: 168; Ensembl: ENSG00000103502) (SEQ. ID. No. 65).

[0119] SEZ6L2 (mRNA Genbank Accession Nos. NM_{—}001114099.1; NM_{—}001114100.1; NM_{—}012410.2; NM_{—}201575.2) is seizure related 6 homolog (mouse)-like 2. It is also known as FLJ90517, PSK-1, type I transmembrane receptor (seizure related protein) and type I transmembrane receptor (seizure-related protein). (Genomic Genbank Accession no. NC_{—}000016.8 GI:51511732; Region: complement (29,790,329-29,818,074); GenomeProject:168; Ensembl: ENSG00000174938) (SEQ. ID. No. 66).

[0120] ASPHD1 (mRNA Genbank Accession No. NM_{—}181718.3) is aspartate beta-hydroxylase domain containing protein 1. (Genomic Genbank Accession no. NC_{—}000016.8 GI:51511732; Region: complement (29,819,648-29,824,878); GenomeProject: 168; Ensembl: ENSG00000174939) (SEQ. ID. No. 67).

[0121] KCTD13 (mRNA Genbank Accession No. NM_{—}178863.2) is potassium channel tetramerisation domain containing protein 13. It is also known as FKSG86, PDIP1, POLDIP1, TNFAIP1-like and polymerase delta-interacting protein 1 (Genomic Genbank Accession no. NC_{—}000016.8 GI:51511732; Region: complement (29,825,164-29,845,046); GenomeProject:168; Ensembl: ENSG00000174943) (SEQ. ID. No. 68).

[0122] LOC124446 (mRNA Genbank Accession No. NM_{—}001083613.1; NM_{—}194280.3) is TMEM219 or transmembrane protein 219. (Genomic Genbank Accession no. NC_{—}000016.8 GI:51511732; Region: complement (29,880,852-29,891,874); GenomeProject: 168; Ensembl: ENSG00000149932) (SEQ. ID. No. 69).

[0123] HIRIP3 (mRNA Genbank Accession No. NM_{—}003609.2) is HIRA interacting protein 3. The HIRA protein shares sequence similarity with Hir1p and Hir2p, the two corepressors of histone gene transcription characterized in the yeast, Saccharomyces cerevisiae. The structural features of the HIRA protein suggest that it may function as part of a multiprotein complex. Recently, several cDNAs encoding HIRA-interacting proteins, or HIRIPs, have been identified. In vitro, the HIRIP3 gene product binds HIRA, as well as H2B and H3 core histones, indicating that a complex containing HIRA-HIRIP3 could function in some aspects of chromatin and histone metabolism. (Genomic Genbank Accession no. NC_{—}000016.8 GI:51511732; Region: complement (29,911,817-29,914,888); GenomeProject: 168; Ensembl: ENSG00000149929) (SEQ. ID. No. 70).

[0124] CCDC95 (mRNA Genbank Accession No. NM_{—}173618.1) is coiled-coil domain containing 95. It is also known as INO80E, INO80 complex subunit E, FLJ00079 and FLJ90652. (Genomic Genbank Accession no. NC_{—}000016.8 GI:51511732; Region: complement (29,915,032-29,924,613); GenomeProject:168; Ensembl: ENSG00000169592) (SEQ. ID. No. 71).

[0125] DOC2A (mRNA Genbank Accession No. NM_{—}003586.2) is double C2-like domains protein, alpha. DOC2A is mainly expressed in brain and is suggested to be involved in Ca(²⁺)-dependent neurotransmitter release. (Genomic Genbank Accession no. NC_{—}000016.8 GI:51511732; Region: complement (29,924,336-29,929,902); GenomeProject:168; Ensembl: ENSG00000149927) (SEQ. ID. No. 72).

[0126] FAM57B (mRNA Genbank Accession No. NM_{—}031478.4) is family with sequence similarity 57 protein member B. It is also known as DKFZp43412117, FP1188, and hypothetical protein LOC83723. (Genomic Genbank Accession no. NC_{—}000016.8 GI:51511732; Region: complement 29,943,249-29,949,687); GenomeProject: 168; Ensembl: ENSG00000149926) (SEQ. ID. No. 73).

[0127] ALDOA (mRNA Genbank Accession No. NM_{—}000034.2; NM_{—}001127617.1; NM_{—}184041.1; NM_{—}184043.1) is aldolase A or fructose-bisphosphate. It is a glycolytic enzyme that catalyzes the reversible conversion of fructose-1,6-bisphosphate to glyceraldehyde 3-phosphate and dihydroxyacetone phosphate. Three aldolase isozymes (A, B, and C), encoded by three different genes, are differentially expressed during development. Aldolase A is found in the developing embryo and is produced in even greater amounts in adult muscle. Aldolase A expression is repressed in adult liver, kidney and intestine and similar to aldolase C levels in brain and other nervous tissue. Aldolase A deficiency has been associated with myopathy and hemolytic anemia. Alternative splicing of this gene results in multiple transcript variants which encode the same protein. It is also known as ALDA, MGC10942, MGC17716, MGC17767, aldolase A, fructose-1,6-bisphosphate triosephosphate-lyase and fructose-bisphosphate aldolase A. (Genomic Genbank Accession no. NC_{—}000016.8 GI:51511732; Region: complement (29,971,992-29,989,236); GenomeProject:168; Ensembl: ENSG00000149925) (SEQ. ID. No. 74).

[0128] PPP4C (mRNA Genbank Accession No. NM_{—}002720.1) is protein phosphatase 4 (formerly X), catalytic subunit. It is also known as PP4, PPH3, and PPX. (Genomic Genbank Accession no. NC_{—}000016.8 GI:51511732; Region: complement (29,994,886-30,004,196); GenomeProject:168; Ensembl: ENSG00000149923) (SEQ. ID. No. 75).

[0129] YPEL3 (mRNA Genbank Accession No. NM_{—}031477.4) is yippee-like 3 protein is a putative zinc-binding protein. (Genomic Genbank Accession no. NC_{—}000016.8 GI:51511732; Region: complement (30,011,136-30,015,022); GenomeProject: 168; Ensembl: ENSG00000090238) (SEQ. ID. No. 76).

[0130] GDPD3 (mRNA Genbank Accession No. NM_{—}024307.2) is glycerophosphodiester phosphodiesterase domain containing protein 3. It is also known as FLJ22603 and MGC4171. (Genomic Genbank Accession no. NC_{—}000016.8 GI:51511732; Region: complement (30,023,632-30,032,379); GenomeProject: 168; Ensembl: ENSG00000102886) (SEQ. ID. No. 77).

[0131] MAPK3 (mRNA Genbank Accession No. NM_{—}001040056.1; NM_{—}001109891.1; NM_{—}002746.2) is mitogen-activated protein kinase 3. MAP kinases, also known as extracellular signal-regulated kinases (ERKs), act in a signaling cascade that regulates various cellular processes such as proliferation, differentiation, and cell cycle progression in response to a variety of extracellular signals. This kinase is activated by upstream kinases, resulting in its translocation to the nucleus where it phosphorylates nuclear targets. Alternatively spliced transcript variants encoding different protein isoforms have been described. It is also known as ERK1, HS44 KDAP, HUMKER1A, MGC20180, P44ERK1, P44MAPK, PRKM3, OTTHUMP00000174538, OTTHUMP0000174540, extracellular signal-regulated kinase 1 and extracellular signal-related kinase 1. (Genomic Genbank Accession no. NC_{—}000016.8 GI:51511732; Region: complement (30,032,927-30,042,131); GenomeProject: 168; Ensembl: ENSG00000102882) (SEQ. ID. No. 78).

[0132] CORO1A (mRNA Genbank Accession No. NM_{—}007074.2) is coronin, an actin binding protein, 1A. It is also known as CLABP, CLIPINA, FLJ41407, HCORO1, MGC117380, TACO, p57, and coronin-1. (Genomic Genbank Accession no. NC_{—}000016.8 GI:51511732; Region: complement (30,102,427-30,107,898); GenomeProject: 168; Ensembl: ENSG00000102879) (SEQ. ID. No. 79).

[0133] In one embodiment, the method for diagnosing ASD and/or autism and/or predicting susceptibility or likelihood of developing ASD and/or autism comprises detecting the presence of a microdeletion or a microduplication in a region 29,581,801-29,589,329 on chromosome 16. (Genbank Accession no. NC_{—}000016.8, GI:51511732; Region: 29,581,801-29,589,329; GenomeProject: 168; Ensembl:ENSG00000197471).

[0134] In one embodiment the method for diagnosing ASD and/or autism and/or predicting susceptibility or likelihood of developing ASD and/or autism comprises detecting the presence of a microdeletion or a microduplication in a region 29,582,081 to 29,589,324 on chromosome 16 according to the Human Genome Build 18 (Hg 18).

[0135] In one embodiment, the method for diagnosing ASD and/or autism and/or predicting susceptibility or likelihood of developing ASD and/or autism comprises detecting the presence of a microdeletion or a microduplication in a region 29725356-29730005 on chromosome 16. (Genbank Accession no. NC_{—}000016.8 GI:51511732; Region: 29,725,356-29,730,005; GenomeProject: 168; Ensembl:ENSG00000103495).

[0136] In one embodiment, the method for diagnosing ASD and/or autism and/or predicting susceptibility or likelihood of developing ASD and/or autism comprises detecting the presence of a microdeletion or a microduplication in a region 29,892,723-29,911,082 on chromosome 16. (Genbank Accession no. NC_{—}000016.8 GI:51511732; Region: 29,892,723-29,911,082; GenomeProject: 168; Ensembl:ENSG00000149930).

[0137] In one embodiment, the method for diagnosing ASD and/or autism and/or predicting susceptibility or likelihood of developing ASD and/or autism comprises detecting the presence of a microdeletion or microduplication in a region 29,899,174 to 29,907,220 on chromosome 16 according to the Human Genome Build 18 (Hg 18).

[0138] In one embodiment, the method for diagnosing ASD and/or autism and/or predicting susceptibility or likelihood of developing ASD and/or autism comprises detecting the presence of a microdeletion or a microduplication in a region 30,004,583-30,010,709 on chromosome 16. (Genbank Accession no. NC_{—}000016.8 GI:51511732; Region: complement (30004583-30010709); GenomeProject: 168; Ensembl:ENSG00000149922).

[0139] In one embodiment, the method for diagnosing ASD and/or autism and/or predicting susceptibility or likelihood of developing ASD and/or autism comprises detecting the presence of a microdeletion or a microduplication in a region 29,560,500 to 30,106,852 on chromosome 16 according to the Human Genome Build 18 (Hg 18).

[0140] In one embodiment, the method for diagnosing ASD and/or autism and/or predicting susceptibility or likelihood of developing ASD and/or autism comprises detecting the presence of a microdeletion or a microduplication in a region 29,362,092-33,255,393 on chromosome 16 according to the Human Genome Build 18 (Hg 18).

[0141] In one embodiment, the method for diagnosing ASD and/or autism and/or predicting susceptibility or likelihood of developing ASD and/or autism comprises detecting the presence of a microdeletion or a microduplication in a region 29,581,455 to 30,027,260 on chromosome 16 according to the Human Genome Build 18 (Hg 18).

[0142] In one embodiment, the method for diagnosing ASD and/or autism and/or predicting susceptibility or likelihood of developing ASD and/or autism comprises detecting the presence of a microdeletion or a microduplication in the region 29,560,500 to 30,104,842 on chromosome 16 according to the Human Genome Build 18 (Hg 18).

[0143] In one embodiment, the method for diagnosing ASD and/or autism and/or predicting susceptibility or likelihood of developing ASD and/or autism comprises detecting the presence of a microdeletion or a microduplication in a region 29,560,500 to 30,104,842 on chromosome 16 according to the Human Genome Build 18 (Hg 18).

[0144] In one embodiment, the method for diagnosing ASD and/or autism and/or predicting susceptibility or likelihood of developing ASD and/or autism comprises detecting the presence of a microdeletion or a microduplication in a region 29,362,092 to 30,015,022 on chromosome 16 according to the Human Genome Build 18 (Hg 18).

[0145] In one embodiment, the method for diagnosing ASD and/or autism and/or predicting susceptibility or likelihood of developing ASD and/or autism comprises detecting the presence of a microdeletion or a microduplication in a region 29,581,455 to 30,240,082 on chromosome 16 according to the Human Genome Build 18 (Hg 18).

[0146] In one embodiment, the method for diagnosing ASD and/or autism and/or predicting susceptibility or likelihood of developing ASD and/or autism comprises detecting the presence of a microdeletion or a microduplication in a region 29,560,500 to 30,255,393 on chromosome 16 according to the Human Genome Build 18 (Hg 18).

[0147] In one embodiment, the method for diagnosing ASD and/or autism and/or predicting susceptibility or likelihood of developing ASD and/or autism comprises detecting the deletion or the duplication of at least one, two, three, four, five, six, seven, eight, nine, ten, 11, 12, 13, 14, 15, 16, 17, 18, 19, 20, 21, 22, 23, 24, 25, 26, 27, or 28 of the genes selected from the group consisting of: BOLA2, GIYD1/2, SULTI1A3/4, SPN, QPRT, c16orf4, KIF22, MAZ, PRRT2, c16orf53, MVP, CDIPT, SEZ6L2, ASPHD1, KCTD13, LOC124446, HIRIP3, CCDC95, DOC2A, FAM57B, ALDOA, PPP4C, YPEL3, GDPD3, MAPK3, CORO1A, TAO K2, and TBX6.

[0148] In one embodiment, the method for diagnosing ASD and/or autism and/or predicting susceptibility or likelihood of developing ASD and/or autism comprises detecting a deletion or a duplication of at least one, two, three or four genes: SPN, MAZ, TAO K2 and TBX6. In one embodiment, the deletion or the duplication of any of these four genes is complete, wherein all the 3′UTR, 5′UTR, introns and exons in the genomic sequence are all deleted. In one embodiment, the deletion of any of these four genes is partial, wherein a portion of the genomic sequence comprising the 3′UTR, 5′UTR, introns and exons is deleted.

[0149] In one embodiment, the probes used in detecting the deletion or the duplication in the region 29,362,092-33,255,393 on chromosome 16p11.2 comprises sequences from SEQ. ID. Nos. 43-46 and 56-79. In one embodiment, the probes used consist of SEQ. ID. Nos. 43-46 and 56-79. In one embodiment, the probes used consist essentially of SEQ. ID. Nos. 43-46 and 56-79.

[0150] In one embodiment, the probes used in detecting the segmental duplication in the region 29,362,092-33,255,393 on chromosome 16p11.2 comprises sequences from SEQ. ID. Nos. 54 and 55. In one embodiment, the probes used consist of SEQ. ID. Nos. 54 and 55. In one embodiment, the probes used consist essentially of SEQ. ID. Nos. 54 and 55.

[0151] In one embodiment, provided herein is a method for diagnosing ASD and/or autism in an individual, the method comprising detecting a microduplication on chromosome 15q13.2q13.3 wherein the presence of an about 0.500 Mb or larger microduplication on chromosome 15q13.2q13.3 in the genome of the individual is indicative that the individual is likely affected with autism.

[0152] In one embodiment, the microduplication on chromosome 15q13.2q13.3 occurs between BP4-BP5 region. BP4-BP5 covers about 1.5 Mb (chr15:28.719-30.298 Mb) and comprises six protein-coding genes and one miRNA gene as indicated below. Smaller duplications are about 0.500 Mb (chr15:28.902-29.404 Mb) and comprises MTMR15, MTMR10, TRPM1, and one miRNA gene (hsa-mir-211). The BP4-BP5 deletion and duplication events span CHRNA7, a candidate gene for seizures. The six reference genes are MTMR15, MTMR10, TRPM1, KLF13, OTUD7A and CHRNA7, and the miRNA gene is hsa-mir-211.

[0153] In one embodiment, the microduplication on chromosome 15q13.2q13.3, BP4-BP5 region is anywhere between about 0.500 Mb to about 2 Mb long. In one embodiment, the microduplication on chromosome 15q13.2q13.3, BP4-BP5 region is anywhere between 0.500 Mb to 2 Mb long.

[0154] In one embodiment, provided herein is a method for predicting susceptibility or likelihood of an individual in developing ASD and/or autism, the method comprising detecting a microduplication on chromosome 15q13.2q13.3, wherein the presence of an about 0.500 Mb or larger microduplication on chromosome 15q13.2q13.3 in the genome of the individual indicates that the individual is likely affected with autism.

[0155] In one embodiment, the microduplication at 15q13.2q13.3 BP4-BP5 region comprises at least one, two, three, four, five, six or seven of the genes selected from the group consisting of: MTMR15, MTMR10, TRPM1, KLF13, OTUD7A, CHRNA7 and miRNA gene (hsa- mir-211). A skilled artisan in the art will be able to design oligonucleotide probes for use in the various detection methods known in the art, e.g. FISH, MLPA, oligonucleotide-based array CGH, to detect the deletion of these genes in a nucleic acid sample, such as, a genomic DNA of the individual who is tested.

[0156] MTMR15 (mRNA Genbank Accession No. NM_{—}014967) is myotubularin related protein 15. It is also known as DKFZp451H236, DKFZp686K16147, and KLAA1018. (Genbank Accession No. NC_{—}000015.8 GI:51511731; Region: 28,983,421-29022600; GenomeProject:168; Ensembl:ENSG00000198690) (SEQ. ID. No. 47). This gene can be found on Chromosome 15 at location 28,983,399-29,022,600. The start of this gene is located in Contig AC087481.9.1.179400.

[0157] MTMR10 (mRNA Genbank Accession No. NM_{—}017762) is myotubularin related protein 10. It is also known as FLJ20313. (Genbank Accession no. NC_{—}000015.8 GI:51511731; Region: complement (29,018,436-29,071,099); GenomeProject: 168; Ensembl:ENSG00000166912) (SEQ. ID. No. 48). This gene can be found on Chromosome 15 at location 29,020,705-29,071,099. The start of this gene is located in Contig AC090829.3.1.102926.

[0158] TRPM1 (mRNA Genbank Accession No. NM_{—}002420) is transient receptor potential cation channel, subfamily M, member 1. It is also known as MLSN1 and LTRPC1. (Genbank Accession no. NC_{—}000015.8 GI:51511731; Region: complement (29,080,829-29,181,216); GenomeProject:168; Ensembl:ENSG00000134160) (SEQ. ID. No. 49). The protein encoded by this gene is similar to the transient receptor potential (Trp) calcium channel family members. The expression of this protein is inversely correlated with melanoma aggressiveness, suggesting that it suppresses melanoma metastasis. This gene can be found on Chromosome 15 at location 29,080,845-29,181,216. The start of this gene is located in Contig AC009562.9.1.221475.

[0159] KLF13 (mRNA Genbank Accession No. NM_{—}015995.2) is Kruppel-like factor 13. It is also known as BTEB3, FKLF2, NSLP1, RFLAT-1, RFLAT1, RANTES factor of late activated T lymphocytes-1, Sp1 like zinc finger transcription factor, basic transcription element binding protein 3, and transcription factor NSLP1. (Genbank Accession No. NC_{—}000015.8 GI:51511731; Region: 29,406,375-29,457,394; GenomeProject: 168; Ensembl:ENSG00000169926) (SEQ. ID. No. 50). KLF13 belongs to a family of transcription factors that contain 3 classical zinc finger DNA-binding domains which consists of a zinc atom tetrahedrally coordinated by 2 cysteines and 2 histidines (C₂H₂ motif). These transcription factors bind to GC-rich sequences and related GT and CACCC boxes. This gene can be found on Chromosome 15 at location 29,406,375-29,457,393. The start of this gene is located in Contig AC012236.12.1.173729.

[0160] OTUD7A (mRNA Genbank Accession No. NM_{—}130901) is OTU domain containing 7A. It is also known as OTUD7, C15orf16, C16ORF15, and CEZANNE2. (Genbank Accession No. NC_{—}000015.8 GI:51511731; Region: complement (29,562,621-29,734,834); GenomeProject:168; Ensembl:ENSG00000169918) (SEQ. ID. No. 51). De-ubiquitinating enzymes (DUBs; see MIM 603478) are proteases that specifically cleave ubiquitin (MIM 191339) linkages, negating the action of ubiquitin ligases. OTUD7A belongs to a DUB subfamily characterized by an ovarian tumor (OTU) domain. This gene can be found on Chromosome 15 at location 29,562,621-29,734,834. The start of this gene is located in Contig AC104266.7.1.88425.

[0161] CHRNA7 (mRNA Genbank Accession No. NM_{—}000746) is cholinergic receptor, nicotinic, alpha 7. It is also known as NACHRA7 or CHRNA7-2. (Genbank Accession No. NC_{—}000015.8 GI:51511731; Region: 30,110,018-30,248,541; GenomeProject:168; Ensembl:ENSG00000175344) (SEQ. ID. No. 52). The nicotinic acetylcholine receptors (nAChRs) are members of a superfamily of ligand-gated ion channels that mediate fast signal transmission at synapses. The nAChRs are thought to be hetero-pentamers composed of homologous subunits. The proposed structure for each subunit is a conserved N-terminal extracellular domain followed by three conserved transmembrane domains, a variable cytoplasmic loop, a fourth conserved transmembrane domain, and a short C-terminal extracellular region. The protein encoded by this gene forms a homo-oligomeric channel, displays marked permeability to calcium ions and is a major component of brain nicotinic receptors that are blocked by, and highly sensitive to, alpha-bungarotoxin. This gene can be found on Chromosome 15 at location 30,110,018-30,249,002. The start of this gene is located in Contig AC079969.5.1.227506.

[0162] hsa-mir-211 (Genbank Accession No. AF071787) is a micro RNA (miRNA) gene (miRBase Accession No. M10000287; Genbank Accession no. NC_{—}000016.8 GI:51511732; 29,142,527-29,146,636; GenomeProject:168) (SEQ. ID. No. 53). Chromosome 15, Region: 29,142,527-29,146,636; Ensembl Homo sapien version 50.361; NCBI 36.

[0163] In one embodiment, the method for diagnosing ASD and/or autism, and/or predicting susceptibility or likelihood of an individual developing ASD and/or autism, comprises detecting the presence of a microduplication in a region 28,719,136-30,701,432 on chromosome 15 according to the Human Genome Build 18 (Hg 18).

[0164] In one embodiment, the method for diagnosing ASD and/or autism, and/or predicting susceptibility or likelihood of an individual developing ASD and/or autism, comprises detecting the presence of a microduplication in a region 28,719,136-30,648,918 on chromosome 15 according to the Human Genome Build 18 (Hg 18).

[0165] In one embodiment, the method for diagnosing ASD and/or autism, and/or predicting susceptibility or likelihood of an individual developing ASD and/or autism, comprises detecting the presence of a microduplication in a region 28,902,339-29,404,603 on chromosome 15 according to the Human Genome Build 18 (Hg 18).

[0166] In one embodiment, the method for diagnosing ASD and/or autism, and/or predicting susceptibility or likelihood of an individual developing ASD and/or autism, comprises detecting the presence of a microduplication in a region 28,983,399-29,022,600 on chromosome 15 according to the Human Genome Build 18 (Hg 18).

[0167] In one embodiment, the method for diagnosing ASD and/or autism, and/or predicting susceptibility or likelihood of an individual developing ASD and/or autism, comprises detecting the presence of a microduplication in a region 28,983,421 to 28,991,134 on chromosome 15 according to the Human Genome Build 18 (Hg 18).

[0168] In one embodiment, the method for diagnosing ASD and/or autism, and/or predicting susceptibility or likelihood of an individual developing ASD and/or autism, comprises detecting the presence of a microduplication in a region 29,018,436-29,071,099 on chromosome 15 according to the Human Genome Build 18 (Hg 18).

[0169] In one embodiment, the method for diagnosing ASD and/or autism, and/or predicting susceptibility or likelihood of an individual developing ASD and/or autism, comprises detecting the presence of a microduplication in a region 29,080,829-29,181,216 on chromosome 15 according to the Human Genome Build 18 (Hg 18).

[0170] In one embodiment, the method for diagnosing ASD and/or autism, and/or predicting susceptibility or likelihood of an individual developing ASD and/or autism, comprises detecting the presence of a microduplication in a region 29,080,843 to 29,181,216 on chromosome 15 according to the Human Genome Build 18 (Hg 18).

[0171] In one embodiment, the method for diagnosing ASD and/or autism, and/or predicting susceptibility or likelihood of an individual developing ASD and/or autism, comprises detecting the presence of a microduplication in a region 29,406,375-29,457,394 on chromosome 15 according to the Human Genome Build 18 (Hg 18).

[0172] In one embodiment, the method for diagnosing ASD and/or autism, and/or predicting susceptibility or likelihood of an individual developing ASD and/or autism, comprises detecting the presence of a microduplication in a region 29,562,621-29,734,834 on chromosome 15 according to the Human Genome Build 18 (Hg 18).

[0173] In one embodiment, the method for diagnosing ASD and/or autism, and/or predicting susceptibility or likelihood of an individual developing ASD and/or autism, comprises detecting the presence of a microduplication in a region 30,110,018-30,248,541 on chromosome 15 according to the Human Genome Build 18 (Hg 18).

[0174] In one embodiment, the method for diagnosing ASD and/or autism, and/or predicting susceptibility or likelihood of an individual developing ASD and/or autism, comprises detecting the presence of a microduplication in a region 30,110,018 to 30,248,527 on chromosome 15 according to the Human Genome Build 18 (Hg 18).

[0175] In one embodiment, the method for diagnosing ASD and/or autism, and/or predicting susceptibility or likelihood of an individual developing ASD and/or autism, comprises detecting the presence of a microduplication in a region 29,142,527-29,146,636 on chromosome 15 according to the Human Genome Build 18 (Hg 18).

[0176] In one embodiment, the method for diagnosing ASD and/or autism, and/or predicting susceptibility or likelihood of an individual developing ASD and/or autism, comprises detecting the presence of a microduplication in a region 29,080, 829 to 29,181,199 on chromosome 15 according to the Human Genome Build 18 (Hg 18).

[0177] In one embodiment, the method for diagnosing ASD and/or autism, and/or predicting susceptibility or likelihood of an individual developing ASD and/or autism, comprises detecting a microduplication of all seven genes: MTMR15, MTMR10, TRPM1, KLF13, OTUD7A, CHRNA7 and miRNA gene hsa-mir-211. In one embodiment, the method for diagnosing ASD and/or autism, and/or predicting susceptibility or likelihood of an individual developing ASD and/or autism, comprises detecting a microduplication of at least one, two, three, four, five, six, or seven of the genes selected from the group consisting of: MTMR15, MTMR10, TRPM1, KLF13, OTUD7A, CHRNA7 and miRNA gene (hsa-mir-211). In one embodiment, the method for diagnosing ASD and/or autism, and/or predicting susceptibility or likelihood of an individual developing autism, comprises detecting a microduplication of four genes: MTMR15, MTMR10, TRPM1, and has-mir-211. In one embodiment, the microduplication of any of the seven genes is complete, wherein all the 3′UTR, 5′UTR, introns and exons in the genomic sequence are duplicated. In one embodiment, the microduplication of any of the seven genes is partial, wherein a portion of the genomic sequence comprising the 3′UTR, 5′UTR, introns and exons is duplicated.

[0178] In one embodiment, the probes used in detecting the microduplication in region 28,719,136-30,701,432 on chromosome 15 comprise sequences from SEQ. ID. Nos. 47-53.

[0179] In one embodiment, the probes used in detecting the microduplication in region 28,719,136-30,701,432 on chromosome 15 consist of SEQ. ID. Nos. 47-53.

[0180] In one embodiment, the probes used in detecting the microduplication in region 28,719,136-30,701,432 on chromosome 15 consist essentially of SEQ. ID. Nos. 47-53.

[0181] In another embodiment, provided herein method for diagnosing ASD and/or autism in an individual, the method comprising detecting a microdeletion on chromosome 15q13.2q13.3 wherein the presence of an about 0.500 Mb or larger microdeletion on chromosome 15q13.2q13.3 in the genome of the individual is indicative that the individual is likely affected with autism.

[0182] In one embodiment, the microdeletion on chromosome 15q13.2q13.3 occurs between BP4-BP5 region.

[0183] In one embodiment, the microdeletion on chromosome 15q13.2q13.3, BP4-BP5 region is between about 0.500 Mb to about 2 Mb long. In one embodiment, the microdeletion on chromosome 15q13.2q13.3, BP4-BP5 region is between 0.500 Mb to 2 Mb long.

[0184] In one embodiment, provided herein is a method for predicting susceptibility or likelihood of an individual in developing ASD and/or autism, the method comprising detecting a microdeletion on chromosome 15q13.2q13.3, wherein the presence of an about 0.500 Mb or more microdeletion on chromosome 15q13.2q13.3 in the genome of the individual is indicative that the individual is susceptibility or likely to be affected with autism.

[0185] In one embodiment, the microdeletion at 15q13.2q13.3 BP4-BP5 region at least one, two, three, four, five, six or seven of the genes selected from the group consisting of: MTMR15, MTMR10, TRPM1, KLF13, OTUD7A CHRNA7 and miRNA gene, hsa-mir-211. A skilled artisan in the art will be able to design oligonucleotide probes for use in the various detection methods known in the art, e.g. FISH, MLPA, oligonucleotide-based array CGH, to detect the deletion of these genes in a nucleic acid sample, such as, a genomic DNA of the individual who is being tested.

[0186] In one embodiment, the method for diagnosing ASD and/or autism, and/or predicting susceptibility or likelihood of an individual developing ASD and/or autism, comprises detecting the presence of a microdeletion in a region 28,709,202-30,401,675 on chromosome 15 according to the Human Genome Build 18 (Hg 18).

[0187] In one embodiment, the method for diagnosing ASD and/or autism, and/or predicting susceptibility or likelihood of an individual developing ASD and/or autism, comprises detecting the presence of a microdeletion in a region 28,709,202-30,701,432 on chromosome 15 according to the Human Genome Build 18 (Hg 18).

[0188] In one embodiment, the method for diagnosing ASD and/or autism, and/or predicting susceptibility or likelihood of an individual developing ASD and/or autism, comprises detecting the microdeletion of all seven genes: MTMR15, MTMR10, TRPM1, KLF13, OTUD7A, CHRNA7 and miRNA gene (hsa-mir-211). In one embodiment, the method for diagnosing ASD and/or autism, and/or predicting susceptibility or likelihood of an individual developing ASD and/or autism, comprises detecting the microduplication of four genes: MTMR15, MTMR10, TRPM1, and has-mir-211. In one embodiment, the method for diagnosing ASD and/or autism, and/or predicting susceptibility or likelihood of an individual developing ASD and/or autism, comprises detecting the microdeletion of at least one, two, three, four, five, six, or seven of the genes selected from the group consisting of: MTMR15, MTMR10, TRPM1, KLF13, OTUD7A, CHRNA7 and miRNA gene (hsa-mir-211). In one embodiment, the microdeletion of any of the seven genes is complete, wherein all the 3′UTR, 5′UTR, introns and exons in the genomic sequence are deleted. In one embodiment, the microdeletion of any of the seven genes is partial, wherein a portion of the genomic sequence comprising the 3′UTR, 5′UTR, introns and exons is deleted.

[0189] In one embodiment, the probes used in detecting the microdeletion in region 28,709,202-30,401,675 on chromosome 15 comprise sequences from SEQ. ID. Nos. 47-53.

[0190] In one embodiment, the probes used in detecting the microdeletion in region 28,709,202-30,401,675 on chromosome 15 consist of SEQ. ID. Nos. 47-53.

[0191] In one embodiment, the probes used in detecting the microdeletion in region 28,709,202-30,401,675 on chromosome 15 consist essentially of SEQ. ID. Nos. 47-53.

[0192] In some embodiments, the methods described herein are conducted using nucleic acid samples isolated from the individuals. The individuals are humans, adults, children, or fetus. The nucleic acid samples can be isolated from cells obtained from the individuals. For example, fetal cells obtained in routine amniocentesis conducted from 10 weeks of gestation onwards; cells from a newly born infant can be obtained from the umbilical cord blood, placenta, or a blood sample; for older children and individuals, cells can be obtained from a blood sample or a cheek swab. Genomic DNA can be extracted from any biological sample containing nucleated cells, such as a peripheral blood sample or a tissue sample (e.g., mucosal scrapings of the lining of the mouth or from renal or hepatic tissue). One ordinary skilled in the art will be able to isolate nucleic acid samples from the individuals from various sources. Standard methods can be used to extract genomic DNA from a blood or tissue sample, including, for example, phenol extraction. Alternatively, genomic DNA can be extracted with kits such as the QIAAMP® Tissue Kit (QIAGEN®, Valencia, Calif.), WIZARD® Genomic DNA purification kit (Promega, Madison, Wis.) and the A.S.A.P.™ Genomic DNA isolation kit (Boehringer Mannheim, Indianapolis, Ind.).

[0193] In one embodiment, the nucleic acid sample isolated from an individual is genomic DNA. In one embodiment, genomic DNA is digested by restriction enzymes. In one embodiment, genomic DNA is labeled. Suitable labels, include, for example, radioisotopes (e.g., ¹²⁵I, ¹³¹I, ³⁵S, ³H, ³²P, ³³P, or ¹⁴C), fluorescent moieties (e.g., fluorescein, carboxyfluorescein, fluorescein-5-isothiocyanate (FITC), PerCP, rhodamine, or phycoerythrin (PE)), luminescent moieties (e.g., QDOT™ nanoparticles supplied by the Quantum Dot Corporation, Palo Alto, Calif.), or compounds that absorb light of a defined wavelength. Methods of detecting or quantifying a label depend on the nature of the label and these methods are known in the art. Examples of detectors include, without limitation, x-ray film, radioactivity counters, scintillation counters, spectrophotometers, calorimeters, fluorometers, luminometers, and densitometers.

[0194] In some embodiments, the labeled genomic DNA is hybridized the BAC-based array chips and/or oligonucleotide-based array chips in comparative genomic hybridization (CGH) to detect the presence of the described microdeletions and/or microduplications herein.

[0195] In some embodiments, the methods described herein are conducted in individuals with no family history of ASD and/or autism. In some embodiments, the methods described herein are conducted in individuals with a family history of autism. For example, individuals with at least one direct sibling who is diagnosed with ASD and/or autism or a relative in the extended family who is diagnosed with ASD and/or autism.

[0196] In one embodiment, the individual does not have any problems or symptoms in social skills, language and behavior that are associated with ASD and/or autism at the time of testing or when the methods described herein is performed for that individual.

[0197] In another embodiment, the individual can be beginning to show problems or symptoms in social skills, language and behavior that are associated with ASD and/or autism. The teacher, clinician, friends, parents and/or psychologist have noticed some problems or symptoms in social skills, language and behavior in the child and have recommended the child be evaluated for ASD and/or autism. In social interactions and relationships, symptoms can include those described herein according to DSM-IV: significant problems developing nonverbal communication skills, such as eye-to-eye gazing, facial expressions, and body posture; failure to establish friendships with children the same age; lack of interest in sharing enjoyment, interests, or achievements with other people; lack of empathy. People with ASD and/or autism can have difficulty understanding another person's feelings, such as pain or sorrow. In verbal and nonverbal communication, symptoms can include those described herein according to DSM-UV: delay in, or lack of, learning to talk. As many as 50% of people with ASD and/or autism never speak; problems taking steps to start a conversation. Also, people with ASD and/or autism have difficulties continuing a conversation once it has begun; stereotyped and repetitive use of language. People with ASD and/or autism often repeat over and over a phrase they have heard previously (echolalia). Autistic individuals have difficulty understanding their listener's perspective. For example, a person with autism may not understand that someone is using humor. They may interpret the communication word for word and fail to catch the implied meaning. In limited interests in activities or play, symptoms can include: an unusual focus on pieces. Younger children with autism often focus on parts of toys, such as the wheels on a car, rather than playing with the entire toy or are preoccupation with certain topics. For example, older children and adults may be fascinated by train schedules, weather patterns, or license plates. A need for sameness and routines. For example, a child with autism may always need to eat bread before salad and insist on driving the same route every day to school. Stereotyped behaviors. These can include body rocking and hand flapping.

[0198] In yet another embodiment, the individual has been diagnosed with ASD and/or autism using symptomatic diagnostic criteria as described herein, e.g. in DSM-IV.

[0199] In some embodiments, the microdeletion and/or microduplications described herein are be detected by any DNA, RNA (e.g., Northern blotting), or protein (e.g., Western blotting or protein activity) based method. Non-limiting examples of DNA based methods include quantitative PCR; fluorescence in situ hybridization (FISH); Southern blotting; multiple amplifiable probe hybridization (MAPF, see Hollox et al., 2002, Expert Rev. Mol. Diagn., 2(4):370-8.); multiplex ligation-dependent probe amplification (MLPA, see Schouten et al., 2002, Nucleic Acids Res., 30(12):e57, kits available from MRC-Holland, Amsterdam, The Netherlands); QMPSF (Quantitative Multiplex PCR of Short Fluorescent Fragments, see Casilli et al., 2002, Hum. Mutat. 20(3):218-26), and combinations or modifications of such methods. These methods are well known in the art and one of ordinary skill in the art can perform the analyses using the genomic DNA isolated from the individual.

[0200] In one embodiment, the detection of the microdeletion and/or microduplication in the methods described herein is by multiplex ligation-dependent probe amplification (MLPA) analysis.

[0201] MLPA is a method to establish the copy number of up to 45 nucleic acid sequences in one single PCR amplification reaction. It can be applied on genomic DNA (both copy number detection and methylation quantification) as well as for mRNA profiling. It has been accepted as a simple and reliable method for multiplex detection of copy number changes of genomic DNA sequences using DNA samples derived from blood (Gille, J. J., et al. (2002), Br. J. Cancer, 87, 892-897; Hogervorst, F. B., et al. (2003) Cancer Res., 63, 1449-1453).

[0202] With MLPA, it is possible to perform a multiplex PCR reaction in which up to 45 specific sequences are simultaneously quantified. Amplification products are separated by sequence type electrophoresis. The peaks obtained in the sequence type electrophoresis, when compared with a control sample peak, allows one to determine the gene copy number of a probed gene or nucleic acid sequence in the test sample. As only one pair of PCR primers is used, MLPA reactions result in a very reproducible gel pattern with fragments ranging from 130 to 490 bp. Comparison of this gel pattern to that obtained with a control sample indicates which sequences show an aberrant copy number.

[0203] The general outline of MLPA is shown in FIG. 6 and fully described in Schouten, J. P. et al., (2002) Nucl. Acid Res. 30, e57. MLPA probes are designed that hybridizes to the gene of interest or region of genomic DNA that have variable copies or polymorphism. Each probe is actually in two parts, both of which will hybridize to the target DNA in close proximity to each other. Each part of the probe carries the sequence for one of the PCR primers. Only when the two parts of the MLPA probe are hybridize to the target DNA in close proximity to each other will the two parts be ligated together, and thus form a complete DNA template for the one pair of PCR primers used. When there are microdeletions, the provided MLPA probes that targets the deletion region will not form complete DNA template for the one pair of PCR primers used and so no or lower amount of PCR products will be formed. When there are microduplications, the provided MLPA probes that targets the duplicated region will form many complete DNA templates for the one pair of PCR primers used compared to a normal copy number sample of genomic DNA. The amount of PCR products formed will be more than in a control sample having a normal copy number of the region of interest.

[0204] MLPA probes are able to discriminate between sequences that differ in only one nucleotide. Moreover, MLPA reactions require a minimum of only 20 ng human DNA. In contrast to e.g. FISH and BAC-arrays, the sequences detected are small (about 60 nucleotides). Compared to other techniques, an MLPA reaction is fast, cheap (EUR 12, per reaction) and very simple to perform. The equipment required is present in most molecular biology laboratories: Thermocycler with heated lid and sequence type electrophoresis equipment.

[0205] The general protocol for MLPA is described in Schouten, J. P. et al., (2002) Nucl. Acid Res. 30, e57, on the world wide web at www “dot” mlpa “dot” com and also can be found U.S. Pat. No. 6,955,901, these references are incorporated herein by reference in their entirety.

[0206] To screen for the microdeletion/microduplication and/or segmental duplications in the 16p11.2 region, four pairs of MLPA target-probes are designed based on the unique sequences of four genes within this interval: SPN, AMZ, TAOK and TBX6. Additionally, four pairs of MLPA control probes are included, two pairs corresponding to unique sequences of SEPT1 and LAT genes located on chromosome 16 outside the deletion interval, and two pairs corresponding to unique sequences on other chromosomes. All probes were synthetic oligonucleotides. MLPA reagents are commercially available. Final PCR products can be analyzed on an Applied Biosystems Inc. ABI 3730XL for peak identification and quantification. Copy number alterations were visually inspected by superimposing the peak profile of a test sample with the profile of a normal sample using SoftGenetics GENEMARKER software. For actual copy number quantification, the peak areas can be exported to a Microsoft Excel worksheet. Peak area for each probe are normalized to the mean value for all control probes. The relative ratio of each peak are calculated by comparing between test sample and normal sample. Deletion are identified as relative ratio<0.75 and duplication as relative ratio>1.25.

[0207] In some embodiments, the MLPA target-probes used in the methods described herein are MLPA probes for the 16p11.2 region: GCTTCTCCTTCTCCTTGGGGTGCTGGTG (SEQ. ID No 25), GTAAGCCCAGACGCTCTGGGGAGCACAAC (SEQ. ID No 26), GACACGAGGAGAAAGTGCCATGTCACGTGT (SEQ. ID No 27), GTGGCAAGATGCTGAGCTCGGCTTATATTTCG (SEQ. ID No 28), GCTGGACAACCTGCAGTACCGCAAGATGAAG (SEQ. ID No 29), AAGATCCTGTTCCAAGAGGCACCCAACGGCCCTGG (SEQ. ID No 30), GTCAGTCACTGGCCTGGACCCCGAGGCCCGCTACTTGTTT (SEQ. ID No 31), and CTTCTGGATGTGATTCCGGTGGATGGGGCTCG (SEQ. ID No 32).

[0208] In some embodiments, the MLPA target-probes used in the methods described herein are MLPA probes for the 15q13.2q13.3 BP4-BP5 deletion/duplication region:

(SEQ. ID No 5)

CAATGACTCGCAACCACTCACCGTCTACTTCTC,

(SEQ. ID No 6)

CCTGAGCCTCCTGCAGATCATGGAC,

(SEQ. ID No 9)

CACAGCCAATCTGCCACATGTGTTCAATGAAGGGCGG,

(SEQ. ID No 10)

GGTCCCAAGCAGCCAGAGCGAGAGCCACAG,

(SEQ. ID No 15)

GTGTTATCAGCCACGTAGGGGATGCCTTGAAAGACCACTCCTC,

(SEQ. ID No 16)

CAAGTCCAGAGGCCGGGTTTGTGCTATAGGAATTG,

(SEQ. ID No 17)

GGAGGTCAGGGACAGCTTTCAACAGTCCTGTTGGTCAA,
and

(SEQ. ID No 18)

CCTCGGCCGAATGGAGTTTCCTAGTTACACCATCAATCGGAAAACC.

[0209] In one embodiment, these MLPA target-probes are synthetic oligonucleotides designed to incorporate the primer sequences for the MLPA amplification step as described by MRC-Holland, Amsterdam, The Netherlands.

[0210] In one embodiment, the detection of the microdeletion and/or microduplication in the methods described herein is by oligonucleotide-based array comparative genomic hybridization (oligonucleotide-based array CGH).

[0211] In one embodiment, the detection of the microdeletion and/or microduplication in the methods described herein is by bacterial artificial chromosome-based array comparative genomic hybridization (BAC-based array CGH).

[0212] CGH are methods of determining the relative number of copies of nucleic acid sequences in one or more subject's genomes or portions thereof (for example, a tumor cell) as a function of the location of those sequences in a reference genome (for example, a normal human genome, one who is not diagnosed with autism). The intensity(ies) of the signals from each labeled subject nucleic acid and/or the differences in the ratios between different signals from the labeled subject nucleic acid sequences are compared to determine the relative copy numbers of the nucleic acid sequences in the one or more subject genomes or portions thereof. In U.S. Pat. Nos. 5,721,098, 5,665,549, 5,856,097, 5,976,790, 6,159,685, and 6,335,167 describes CGH and uses. These patents are incorporated herein by reference in their entirety.

[0213] As classical CGH has an average resolution of 10-20 megabases (Mb), it is able to detect changes affecting relatively large chromosomal regions. The introduction of array-based platforms has therefore greatly improved genomic profiling and currently, two technologies are mainly used for screening of DNA copy number; the BAC (Bacterial Artificial Chromosome) and the oligonucleotide-based CGH arrays. BAC-based CGH arrays are amongst the first genomic arrays to be introduced and are routinely used to detect single copy changes in the genome, owing to their high sensitivity.

[0214] In BAC-based array CGH, the CGH array chip is made using BAC amplified genomic sequences. The first whole genome microarray contained 2400 large-insert genomic clones, primarily bacterial artificial chromosomes (BACs). With the total human genome covering 3000 Mb, the resolution of this array is on average close to 1 Mb, about one order of magnitude higher than that obtained with classical CGH. For a full coverage resolution array 30, 000 BACs have been arrayed, increasing the resolution with another order of magnitude.

[0215] In oligonucleotide-based array CGH, the chip is made using synthetic oligonucleic acid of about 60 mer of specific target genes and/or genomic region, and the resolution can be reduced to about 100 kb. In some embodiments, the oligonucleotide-based array CGH encompass array chip comprising synthetic oligonucleic acid of about 60 mer of BOLA2, GIYD1/2, SULTI1A3/4, SPN, QPRT, c16orf54, KIF22, MAZ, PRRT2, c16orf53, MVP, CDIPT, SEZ6L2, ASPHD1, KCTD13, LOC124446, HIRIP3, CCDC95, DOC2A, FAM57B, ALDOA, PPP4C, YPEL3, GDPD3, MAPK3, CORO1A, TAO K2, TBX6, MTMR15, MTMR10, TRPM1, KLF13, OTUD7A and CHRNA7. In other embodiments, the Human Release 2.0 oligonucleotide library, containing 60mer oligonucleotides representing 28 830 unique genes can be obtained from Sigma-Genosys (Zwijndrecht, The Netherlands) and used in making a custom autism oligonucleotide-based array CGH chip. The oligonucleotides are dissolved at 10 μM concentration in 50 mM sodium phosphate buffer pH 8.5 and single spotted onto CODELINK™ slides (Amersham Biosciences), using an OMNIGRID® 100 microarrayer (Genomic Solutions, Ann Arbor, Mich., USA) equipped with SMP3 pins (TeleChem International, Sunnyvale, Calif., USA). After printing slides are processed and blocked prior to use according to the manufacturer's protocol.

[0216] Array CGH chips are available commercially from two companies, AGILENT and NIMBLEGEN. Both companies specializes in oligonucleotide-based array CGH chips. Custom design chips are also available. BAC-based array CGH chips are available from PERKINELMER®. Other CGH reagents and DNA labeling kits are available from PERKINELMER® and INVITROGEN™, Inc.

[0217] In one embodiment, the detection of the microdeletion and/or microduplication in the methods described herein is by fluorescence in situ hybridization (FISH). One ordinary skilled in the art will be able to perform FISH on chromosomal samples derived from individuals according to known standard protocols, such as those described in U.S. Pat. Nos. 5,665,540, 6,242,184 and 7,087,379. These patents are incorporated herein by reference in their entirety.

[0218] In one embodiment, the MLPA probes shown in Table 12 are used in FISH. In another embodiment, the MLPA probes shown in Table 12 are modified such as labeling with fluorescent dyes or a radioisotope. Other suitable labels, include, for example, radioisotopes (e.g., ¹²⁵I, ¹³¹I, ³⁵S, ³H, ³²P, ³³P, or ¹⁴C), fluorescent moieties (e.g., fluorescein, carboxyfluorescein, fluorescein-5-isothiocyanate (FITC), PerCP, rhodamine, or phycoerythrin (PE)), luminescent moieties (e.g., QDOT™ nanoparticles supplied by the Quantum Dot Corporation, Palo Alto, Calif.), or compounds that absorb light of a defined wavelength. Methods of detecting or quantifying a label depend on the nature of the label and are known in the art. Examples of detectors include, without limitation, x-ray film, radioactivity counters, scintillation counters, spectrophotometers, calorimeters, fluorometers, luminometers, and densitometers.

[0219] Unless otherwise explained, all technical and scientific terms used herein have the same meaning as commonly understood by one of ordinary skill in the art to which this disclosure belongs. Definitions of common terms in molecular biology can be found in The Merck Manual of Diagnosis and Therapy, 18th Edition, published by Merck Research Laboratories, 2006 (ISBN 0-911910-18-2); Robert S. Porter et al. (eds.), The Encyclopedia of Molecular Biology, published by Blackwell Science Ltd., 1994 (ISBN 0-632-02182-9); and Robert A. Meyers (ed.), Molecular Biology and Biotechnology: a Comprehensive Desk Reference, published by VCH Publishers, Inc., 1995 (ISBN 1-56081-569-8); Definitions of common terms in molecular biology can also be found in Benjamin Lewin, Genes IX, published by Jones & Bartlett Publishing, 2007 (ISBN-13: 9780763740634); Kendrew et al. (eds.), The Encyclopedia of Molecular Biology, published by Blackwell Science Ltd., 1994 (ISBN 0-632-02182-9); and Robert A. Meyers (ed.), Molecular Biology and Biotechnology: a Comprehensive Desk Reference, published by VCH Publishers, Inc., 1995 (ISBN 1-56081-569-8).

[0220] Unless otherwise stated, the present invention was performed using standard procedures, as described, for example in Maniatis et al., Molecular Cloning: A Laboratory Manual, Cold Spring Harbor Laboratory Press, Cold Spring Harbor, N.Y., USA (1982); Sambrook et al., Molecular Cloning: A Laboratory Manual (2 ed.), Cold Spring Harbor Laboratory Press, Cold Spring Harbor, N.Y., USA (1989); Davis et al., Basic Methods in Molecular Biology, Elsevier Science Publishing, Inc., New York, USA (1986); Methods in Enzymology: Guide to Molecular Cloning Techniques Vol. 152, S. L. Berger and A. R. Kimmerl Eds., Academic Press Inc., San Diego, USA (1987); Current Protocols in Molecular Biology (CPMB) (Fred M. Ausubel, et al. ed., John Wiley and Sons, Inc.); Current Protocols in Protein Science (CPPS) (John E. Coligan, et. al., ed., John Wiley and Sons, Inc.); Current Protocols in Immunology (CPI) (John E. Coligan, et. al., ed. John Wiley and Sons, Inc.); and Current Protocols in Cell Biology (CPCB) (Juan S. Bonifacino et. al. ed., John Wiley and Sons, Inc.) which are all incorporated by reference herein in their entireties.

[0221] It should be understood that this invention is not limited to the particular methodology, protocols, and reagents, etc., described herein and as such can vary. The terminology used herein is for the purpose of describing particular embodiments only, and is not intended to limit the scope of the present invention, which is defined solely by the claims.

[0222] Other than in the operating examples, or where otherwise indicated, all numbers expressing quantities of ingredients or reaction conditions used herein should be understood as modified in all instances by the term “about.”

[0223] The singular terms “a,” “an,” and “the” include plural referents unless context clearly indicates otherwise. Similarly, the word “or” is intended to include “and” unless the context clearly indicates otherwise. It is further to be understood that all base sizes or amino acid sizes, and all molecular weight or molecular mass values, given for nucleic acids or polypeptides are approximate, and are provided for description. Although methods and materials similar or equivalent to those described herein can be used in the practice or testing of this disclosure, suitable methods and materials are described below. The abbreviation, “e.g.” is derived from the Latin exempli gratia, and is used herein to indicate a non-limiting example. Thus, the abbreviation “e.g.” is synonymous with the term “for example.”

[0224] All patents and other publications identified are expressly incorporated herein by reference for the purpose of describing and disclosing, for example, the methodologies described in such publications that might be used in connection with the present invention. These publications are provided solely for their disclosure prior to the filing date of the present application. Nothing in this regard should be construed as an admission that the inventors are not entitled to antedate such disclosure by virtue of prior invention or for any other reason. All statements as to the date or representation as to the contents of these documents is based on the information available to the applicants and does not constitute any admission as to the correctness of the dates or contents of these documents.

### Definitions of Terms

[0225] As used herein, the term “autism”, refers to autism spectrum disorder (ASD) which is also known as Pervasive Developmental Disorders (PDDs). Symptoms include difficulty in social skills, language and behavior. The term “autism” and autism spectrum disorder (ASD) are used interchangeably herein.

[0226] As used herein, the term “comprising” means that other elements can also be present in addition to the defined elements presented. The use of “comprising” indicates inclusion rather than limitation.

[0227] As used herein the term “consisting essentially of” refers to those elements required for a given embodiment. The term permits the presence of elements that do not materially affect the basic and novel or functional characteristic(s) of that embodiment of the invention.

[0228] The term “consisting of” refers to methods and respective components thereof as described herein, which are exclusive of any element not recited in that description of the embodiment.

[0229] The term “gene” means the nucleic acid sequence which is transcribed (DNA) and translated (mRNA) into a polypeptide in vitro or in vivo when operably linked to appropriate regulatory sequences. The gene may or may not include regions preceding and following the coding region, e.g. 5′ untranslated (5′UTR) or “leader” sequences and 3′ UTR or “trailer” sequences, as well as intervening sequences (introns) between individual coding segments (exons).

[0230] In the present invention, “isolated” refers to material removed from its original environment (e.g., the natural environment if it is naturally occurring), and thus is altered “by the hand of man” from its natural state. For example, an isolated nucleic acid from a cell which is substantially or essentially free from components which normally accompany or interact with the nucleic acid as found in the nucleus.

[0231] The term “nucleic acid” refers to deoxyribonucleotides or ribonucleotides and polymers thereof (“polynucleotides”) in either single- or double-stranded form. Unless specifically limited, the term encompasses nucleic acids containing known analogues of natural nucleotides that have similar binding properties as the reference nucleic acid and are metabolized in a manner similar to naturally occurring nucleotides. Unless otherwise indicated, a particular nucleic acid molecule/polynucleotide also implicitly encompasses conservatively modified variants thereof (e.g. degenerate codon substitutions) and complementary sequences as well as the sequence explicitly indicated. Specifically, degenerate codon substitutions may be achieved by generating sequences in which the third position of one or more selected (or all) codons is substituted with mixed-base and/or deoxyinosine residues (Batzer et al., Nucleic Acid Res. 19: 5081 (1991); Ohtsuka et al., J. Biol. Chem. 260: 2605-2608 (1985); Rossolini et al., Mol. Cell. Probes 8: 91-98 (1994)). Nucleotides are indicated by their bases by the following standard abbreviations: adenine (A), cytosine (C), thymine (T), and guanine (G).

[0232] As used herein, the term “genomic DNA” refers to the DNA which is found in the organisms genome and is passed on to offspring as information necessary for survival. The “genomic DNA” is also the “nucleic acid” that is isolated from nucleated cells.

[0233] As used herein, the term “microdeletion” in the genomic DNA refers to absence of a stretch of DNA sequence that is normally found in the genome of a normal individual. The missing stretch of DNA sequence can range from 100 kb to 2 Mb. The loss of a tiny piece of a chromosome, a piece so small its presence is not apparent on ordinary examination (using a regular light microscope to look at chromosomes prepared in the usual fashion). The detection of microduplications requires special techniques such as high-resolution chromosome banding, molecular chromosome analysis (with FISH), or molecular genetic analysis.

[0234] As used herein, the term “microduplication” in the genomic DNA refers to the presence of extra copies of a stretch of DNA sequence that is normally found as single or limited copy in the genome of a normal individual. The gain of a tiny piece of a chromosome, a piece so small its presence is not apparent on ordinary examination (using a regular light microscope to look at chromosomes prepared in the usual fashion). The detection of microduplications typically requires special techniques such as high-resolution chromosome banding, molecular chromosome analysis (with FISH), or molecular genetic analysis. The term “microduplication” and “duplication” are used interchangeably herein.

[0235] As used herein, the term “segmental duplications” are substantially identical segments of DNA at two or more sites in a genome.

[0236] As used herein, a normal individual is one who has not diagnosed with autism, ASD, developmental delay or mental retardation.

[0237] Some embodiments of the present invention can be defined in any of the following alphabetized paragraphs. These embodiments should not be construed as limiting embodiments.
[0238] [A] A method for diagnosing an autism spectrum disorder in a human individual or a human fetus, the method comprising determining whether or not the human individual or the human fetus carries an about 500 kb long microdeletion or microduplication that is flanked by an about 100 kb to about 147 kb long segmental duplication on a chromosome 16p11.2 region between 29.5 Mb and 31.1 Mb, wherein the presence of an about 500 kb long microdeletion or microduplication that is flanked by an about 100 kb to about 147 kb long segmental duplication on the chromosome 16p11.2 region between 29.5 Mb and 31.1 Mb is indicative of diagnosis of the autism spectrum disorder in the human individual or the human fetus.
[0239] [B] The method of paragraph [A], wherein the microdeletion or microduplication comprises at least one gene selected from the group consisting of: BOLA2, GIYD1/2, SULTI1A3/4, SPN, QPRT, c16orf54, KIF22, MAZ, PRRT2, c16orf53, MVP, CDIPT, SEZ6L2, ASPHD1, KCTD13, LOC124446, HIRIP3, CCDC95, DOC2A, FAM57B, ALDOA, PPP4C, YPEL3, GDPD3, MAPK3, CORO1A, TAO K2, and TBX6.
[0240] [C] The method of paragraph [A], wherein the microdeletion or microduplication comprises SPN, MAZ, TAO K2, and TBX6 genes.
[0241] [D] The method of paragraph [A], wherein the segmental duplication is about 147 kb long.
[0242] [E] The method of paragraph [A], wherein the segmental duplication is SEQ. ID. No. 54 or 55.
[0243] [F] The method of paragraph [A], wherein the determination is performed using an oligonucleotide-based array comparative genomic hybridization (oligonucleotide-based CGH).
[0244] [G] The method of paragraph [A], wherein the determination is performed using a bacterial artificial chromosome-based array comparative genomic hybridization (BAC-based CGH).
[0245] [H] The method of paragraph [A], wherein the determination is performed using a fluorescence in situ hybridization (FISH).
[0246] [I] The method of paragraph [A], wherein the determination is performed using a multiplex ligation-dependent probe amplification (MLPA).
[0247] [J] A method for diagnosing an autism spectrum disorder in a human individual or a human fetus, the method comprising determining whether or not the human individual or the human fetus carries a between about 500 kb and about 2 Mb microduplication on chromosome 15q13.2q13.3 between a BP4 and a BP5 region, wherein presence of a between about 500 kb and about 2 Mb long microduplication on chromosome 15q13.2q13.3 between the BP4 and the BP5 region is indicative of diagnosis of the autism spectrum disorder in the human individual or the human fetus.
[0248] [K] The method of paragraph [J], wherein the microduplication is about 500 kb long.
[0249] [L] The method of claim [J], wherein the wherein the microdeletion comprises MTMR15, MTMR10, TRPM1, KLF13, OTUD7A, CHRNA7 and miRNA gene (hsa-mir-211) genes.
[0250] [M] The method of paragraph [J], wherein the determination is performed using an oligonucleotide-based array comparative genomic hybridization (oligonucleotide-based CGH).
[0251] [N] The method of paragraph [J], wherein the determination is performed using a bacterial artificial chromosome-based array comparative genomic hybridization (BAC-based CGH).
[0252] [O] The method of paragraph [J], wherein the determination is performed using a fluorescence in situ hybridization (FISH).
[0253] [P] The method of paragraph [J], wherein the determination is performed using a multiplex ligation-dependent probe amplification (MLPA).
[0254] [Q] A method for diagnosing an autism spectrum disorder in a human individual or a human fetus, the method comprising determining whether or not the human individual or the human fetus carries a between about 500 kb and about 2 Mb long microdeletion on chromosome 15q13.2q13.3, wherein presence of the between about 500 kb and about 2 Mb long microdeletion on chromosome 15q13.2q13.3 is indicative of diagnosis of the autism spectrum disorder in the human individual or the human fetus.
[0255] [R] The method of paragraph [Q], wherein the microdeletion on chromosome 15q13.2q13.3 is located between a BP4 and BP5 region of the chromosome 15q13.2q13.3.
[0256] [S] The method of paragraph [Q], wherein the microdeletion is about 500 kb long.
[0257] [T] The method of claim [Q], wherein the wherein the microdeletion comprises MTMR15, MTMR10, TRPM1, KLF13, OTUD7A, CHRNA7 and miRNA gene (hsa-mir-211). genes.
[0258] [U] The method of paragraph [Q], wherein the determination is performed using an oligonucleotide-based array comparative genomic hybridization (oligonucleotide-based CGH).
[0259] [V] The method of paragraph [Q], wherein the determination is performed using a bacterial artificial chromosome-based array comparative genomic hybridization (BAC-based CGH).
[0260] [W] The method of paragraph [Q], wherein the determination is performed using a fluorescence in situ hybridization (FISH).

[0261] This invention is further illustrated by the following examples which also should not be construed as limiting. The contents of all references cited throughout this application, as well as the examples, figures and tables are incorporated herein by reference in their entirety.

### Example 1

### Focus Oligonucleotide-Based Array CGH for Clinical Diagnosis

[0262] Genomic imbalance causes a variety of human genetic disorders, ranging from imbalance of entire chromosomes, as in Down syndrome, to submicroscopic rearrangements, as in the 22q11 deletion that causes DiGeorge/velocardiofacial syndrome. Genomic imbalance also causes idiopathic mental retardation (Shaw-Smith C, et. al., 2004, J Med Genet., 41:241-8; Schoumans J, et. al., 2005, J Med Genet., 42: 699-705) and is detectable in approximately 30%-4% of cases (Shevell M, et al., 2003, Neurology, 60:367-80) by traditional cytogenetic methods, such as karyotype and fluorescence in situ hybridization (FISH) analyses (Bejjani and Shaffer, 2006, J Mol Diagn., 8:528-33). These traditional cytogenetic methods are labor intensive, especially when multiple genomic regions are interrogated. genomic copy number of multiple targets (de Vries B B, et al., 2005, Am J Hum Genet., 77:606-16). Microarray-based comparative genomic hybridization (CGH) offers the ability to interrogate many more genomic regions in a single assay. Early CGH arrays were composed of large-insert bacterial artificial chromosome (BAC) clones (Pinkel D, et al., 1998, Nat Genet., 20:207-11). BAC-based arrays have revolutionized the detection of genomic imbalance in clinical cytogenetic laboratories (Bejjani and Shaffer, supra; Bejjani B A, et al., 2005, Expert Rev Mol. Diagn., 5:421-9) but are challenging to develop, validate, and manufacture. The fact that BAC clones in standard libraries may be inaccurately mapped could lead to diagnostic errors without careful validation (Bejani B A, et al., 2005, Am J Med Genet A., 134:259-67). Additionally, BAC clone inserts average approximately 150 kb, limiting the resolution of detectable copy-number variants (CNVs) to the size of a BAC insert. Deletion breakpoints that extend beyond the BAC clone cannot be accurately determined. Once validated, BAC arrays are much more efficient than multiplex FISH analysis, but genetic information is constantly changing. Consequently, updates to a BAC-based array require successive rounds of extensive probe validation.

[0263] Oligonucleotide-based arrays offer advantages over BAC-based arrays, and many platforms are available. Oligonucleotide arrays designed for genotyping single-nucleotide polymorphisms may not provide uniform coverage at all sites of genomic imbalance (Friedman J M, et. al., 2006, Am J Hum Genet., 79:500-13; Ylstra B, et. al., 2006, Nucleic Acids Res., 34:445-50). Custom oligonucleotide arrays that are based on libraries of validated synthetic probes can interrogate clinically relevant genomic regions without the need for large-insert clone libraries. We describe an array based on AGILENT's eArray library, a large collection of 60-mer oligonucleotides specifically selected for robust copy-number analysis (see AGILENT Technologies. eArray 4.5 accessed Aug. 2006). This targeted oligonucleotide-based array provides a flexible and adaptable method for CGH to detect genomic copy-number imbalance in the clinical diagnostic laboratory.

### Materials and Methods

### Abbreviations

[0264] Nonstandard abbreviations: FISH, fluorescence in situ hybridization; MLPA, multiplex ligation-dependent probe amplification; CGH, comparative genomic hybridization; BAC, bacterial artificial chromosome; CNV, copy-number variant; SNR, signal-to-noise ratio. Human genes: CTNS, cystinosis, nephropathic; NPHP1, nephronophthisis 1 (juvenile); CARKL, carbohydrate kinase-like.

### Validation Samples

[0265] DNA was obtained from the material remaining from 105 samples after previous clinical assays had been completed for patients who originally had been referred for genetic testing with BAC-based array CGH, FISH, karyotyping, or MLPA in the DNA Diagnostic Laboratory at Children's Hospital Boston and the Medical Genetics Laboratories at Baylor College of Medicine. Genomic imbalance was previously identified in 51 (49%) of the 105 samples. Samples with positive results from prior testing were assigned to a “validation set” and subjected to oligonucleotide-array CGH analysis in these 2 laboratories with the array platform described below. Laboratory personnel were blinded to prior testing results. The Children's Hospital Boston Institutional Review Board approved this project.

### Clinical Samples

[0266] After assay validation, we performed clinical array CGH testing of 211 consecutively submitted samples from presumably unrelated children. Samples were submitted after referral to specialists in the Divisions of Clinical Genetics and Developmental Medicine, and the Department of Neurology for clinical molecular-diagnostic testing. The referring diagnoses for these patients included developmental delay, mental retardation, dysmorphic features, or multiple congenital anomalies. All samples were compared with a reference sample for standard 2-color array CGH, either a 46,XY male or a 46,XX female sample. Reference DNA was purchased from Promega.

[0267] Genomic DNA was extracted from whole blood for all samples with a D50K PUREGENE DNA-isolation reagent set (QIAGEN®/Gentra) according to the manufacturer's instructions. All DNA was stored at −20° C.

### Chip Design

[0268] This focused oligonucleotide chip covers 179 clinically relevant regions of genomic imbalance, including all sub-telomeric and pericentromeric regions, and 95 regions responsible for well-defined microdeletion/microduplication syndromes, mental retardation, and autism. A summary of array coverage is shown on Table 2. A total of 10207 region-specific features and 603 quality-control and negative-control features selected from AGILENT's eArray library are randomly located on the array with a mean spatial resolution of <35 kb within the targeted regions. Each sub-telomeric region has a minimum coverage of 5 Mb. A subset of 660 features is duplicated on each block as a quality-control measure. Arrays were manufactured with AGILENT's SurePrint Inkjet technology. In designing the targeted oligonucleotide-based array, the Database of Genomic Variants was consulted (found at http “colon” “double forward slash” projects “dot” tcag “dot” ca “forward slash” variation “forward slash”) to avoid CNVs with no apparent clinical relevance.

### Comparative Genomic Hybridization (CGH)

[0269] Oligonucleotide-array CGH was performed according to the manufacturer's Oligonucleotide Array-Based CGH for Genomic DNA Analysis protocol (version 3; AGILENT Technologies). Briefly, three μg of DNA (both test sample and control sample) were double digested with Alu I and Rsa I and subsequently purified with QlAPREP® Spin Miniprep kit (QIAGEN® GmbH, Hilden, Germany). Digested samples were labeled with Cy3-dUTP or Cy5-dUTP (Amersham Bioscience, UK) using the Bioprime array CGH DNA Labeling System (INVITROGEN™ Life Technologies, Carlsbad, Calif., USA); paired samples were mixed and subsequently purified by MICROCON® YM-30 (MILLIPORE®, Billerica, Mass., USA). Labeled probes were mixed with Cot-1 DNA (INVITROGEN™ Life Technologies, Carlsbad, Calif., USA), blocking solution and hybridization solution (AGILENT Technologies, Palo Alto, Calif., USA) and hybridized to our 2×11K focused chip and 244K Human Oligo chip (AGILENT Technologies, Palo Alto, Calif., USA). Hybridizations were performed in a 65° C. oven on a rotating rack for 40 hrs. Arrays were washed with wash 1 and 2 solutions (AGILENT Technologies, Palo Alto, Calif., USA) and scanned immediately using the AGILENT scanner.

[0270] Dye-swap verification was performed on all samples with positive findings. For other confirmation assays, BAC-array CGH and FISH confirmation were carried out as described previously (Cheung S W., et. al., 2005, Genet Med., 7:422-32). MLPA confirmation was performed as described previously (Shao H, et. al., 2005, Beijing Da Xue Xue Bao; 37:64-7). The MLPA oligonucleotides for the CTNS (cystinosis, nephropathic) gene are as follows:

exon 2,

(SEQ. ID. No. 37)

GTTTTCACACTGGGCGAAGGGAGGACT
and

(SEQ. ID. No. 38)

CCTGAGCTCTGCCTCTTCCAGTAACATTG;
exon 6,

(SEQ. ID. No. 39)

CCGAGGATACGCTTTCTTGTGATCC
and

(SEQ. ID. No. 40)

GCAGCAGCGCCATTAGCATCATAAACC;
exon 12,

(SEQ. ID. No. 41)

CAACCAAGTTTGGACTCGGGGT
and

(SEQ. ID. No. 42)

CTTCTCCATCGTCTTCGACGTCGTC.

### Data Analysis

[0271] Scanned images were quantified with Feature Extraction software (version 9.0; AGILENT Technologies). We used the signal-to-noise ratio (SNR) and the normalized log₂ ratio (test/reference) with 40 nonpathologic individual DNA samples to evaluate the quality and variability of each feature/target. The SNR was calculated by dividing the mean signal intensity of each feature by the mean background signal intensity. Features with a mean SNR <4 or an SD of the log₂ ratio>0.1 were considered to have poor signal quality and high variability and were filtered out before further analysis. These thresholds were chosen empirically and are similar to those used in similar studies (Shaw-Smith C, et. al., 2004, J Med Genet, 41:241-8; Wong K K, et. al., 2007, Am J Hum Gene, 80:91-104).

[0272] The filtered data were further visualized with CGH Analytics software (version 3.4; AGILENT Technologies) and evaluated the quality of each test with the quality-control metrics generated with CGH Analytics software. Copy-number aberration was indicated with the Aberration Detection Method 2 algorithm for the data that passed quality-control testing. The Aberration Detection Method 2 algorithm finds intervals of varying size with a consistent, appreciably low, or high log₂ ratio. An aberration filter was set to indicate regions with at least 3 targets showing the same direction in copy-number change. The mean log₂ ratio of each region of potential imbalance was calculated and compared with the SD for the whole dataset. A copy-number gain was called if the mean log₂ ratio was greater than twice the SD of the whole dataset, and a loss was called if the mean was less than −2 SDs. These thresholds were chosen empirically and are similar to those used in other such studies (Locke D P, et. al., 2006, Am J Hum Genet., 79:275-90; Sharp A J, et. al., 2006, Nat Genet, 38: 1038-42). Cutoff values for genomic imbalance can be adjusted and set accordingly with the threshold function of CGH Analytics software, especially when a potential mosaic scenario is encountered. Variants not known to be pathogenic were compared with the Database of Genomic Variants, which can be found at the world wide web at http “colon” “double forward slash” projects “period” tcag “period” ca “forward slash” variation “forward slash” to facilitate interpretation.

### Results

### Evaluation of Target Loci and Overall Chip Performance

[0273] Forty sex-matched samples from healthy individuals were analyzed on the array, including 2 self-self hybridizations, to evaluate each feature on the array. Signal quality, log₂ ratio variability, mean SNR, and SD of the log₂ ratio were calculated for each non-control feature. The mean and median signal intensities of all the non-control features were 251 and 178, respectively. The mean and median values of the mean SNRs from all non-control features were 9.05 and 6.39, respectively. More than 91% of the target features had a mean SNR >4. Mean log₂ ratios were distributed symmetrically around the zero value. Only a small fraction of features (52 of 10 025,0.52%) exhibited mean values >0.1 or <−0.1. These features were excluded from the dataset before further analysis. The mean SD of the log₂ ratio of all non-control features was 0.062 (median SD, 0.055).

[0274] A log₂ ratio SD of >0.1 for 714 features (7.12%) was demonstrated; these features were categorized as non-ideal targets and excluded them from further analysis. More than 90% of the features passed the feature level filter criteria: an absolute mean log₂ ratio<0.1, a log₂ ratio SD<0.1, and a mean SNR >4. After excluding non-ideal features, the dataset quality improved dramatically. For example, the SD of the log₂ ratio dropped from >0.06 to <0.03. Features with a large log₂ SD largely overlapped those with a low SNR, further validating this filtering approach. Because the non-ideal targets are approximately evenly distributed across the target regions, the overall resolution of the chip is not appreciably affected.

[0275] Several key variables were used to evaluate chip quality and to describe the quality of the dataset as a whole. These variables included probe-to-probe log₂ ratio noise (DLRSpread), the median signal intensity of both channels, background noise for both channels, and SNR. The following cutoffs were used to pass our quality-control testing: DLRSpread about 0.25, median signal intensity about 50, background noise about 10, and SNR about 15. None of the samples failed quality-control testing because of poor chip quality or problems with hybridization. Two samples failed testing because of DNA impurities; both samples passed quality-control tests after we repurified the DNA.

Chip Validation with Blinded Samples

[0276] Next, blindly tested 65 samples were tested for further chip validation. Genomic imbalance had previously been detected in 51 of the 65 samples by BAC-array CGH, FISH, karyotyping, or MLPA, or by some combination of these analyses, and these 51 samples served as positive controls for validation. The remaining 14 samples had previously been tested by targeted BAC-array CGH with non-pathologic results and thus served as negative controls for validation. All samples were traceable to the technologist who performed the hybridizations.

[0277] Of the 51 validation samples with a previously detected genomic imbalance (Table 3), the samples from 2 cases demonstrated aneuploidy for an entire chromosome, 3 cases involved unbalanced chromosomal rearrangements, 13 cases had subtelomeric deletions/duplications, 17 cases had interstitial deletions/duplications, and 15 cases were associated with known segmental aneuploidy regions, including Angelman/Prader-Willi syndrome (4 cases), atypical Angelman syndrome on 22q13.3 (1 case), an autism phenotype associated with duplication of 15q11-q13 (1 case), a velocardiofacial/DiGeorge syndrome region (5 cases with deletions and 2 with duplication), and Williams-Beuren syndrome (2 cases).

[0278] Across all samples, results from oligonucleotide-array CGH were consistent with the results obtained with the 4 prior methods, but oligonucleotide-based array CGH provided the most precise breakpoint boundaries. FIG. 1 shows a genomic-imbalance event (2q37.3 deletion) identified by oligonucleotide-based array CGH. FISH also confirmation of the 2q37.3 deletion (data not shown).

[0279] Oligonucleotide-array CGH detected no appreciable imbalance events in any of the 14 negative controls, with the exception of several reported CNVs. The dye-swap scheme essentially eliminated false-positive results.

[0280] To further evaluate the confidence of each imbalance call by oligonucleotide-array CGH analysis, the mean log₂ ratios for each detected imbalance region were calculated and compared with the SD for the whole dataset. The value of the mean log₂ ratio/SD indicates the separability of each imbalance event from the background noise of the whole dataset. For the majority of deletion events detected, the value was less than −3.2, whereas the value was >2.6 for the majority of gain events detected.

### Genomic Imbalance Detected in Clinical Samples

[0281] Focused oligonucleotide-array CGH was used to test 211 clinical samples that had been ascertained to have come from individuals with developmental delay, unexplained mental retardation, dysmorphic features, or multiple congenital anomalies. In this cohort, the detection rate for genomic imbalance was approximately 11.9% (25 of 211 samples). All abnormal findings were first verified with a dye-swap array CGH and then independently confirmed by either FISH or MLPA. All the genomic-imbalance events, including CNVs with unknown significance, were divided into 3 categories, as is described below. The imbalance events associated with known disorders or likely to cause disease are listed in Table 1.

Genomic Imbalance Associated with Well-Defined Disorders

[0282] Table 1A lists 12 samples with 10 genomic imbalance events associated with known genetic disorders. In this group, 2 of the samples revealed a complex pattern involving both gain and loss on 2 different chromosomes (case 1) or on the same chromosome (case 2), 2 samples had a well-defined microdeletion syndrome (cases 3 and 4), 1 sample had a subtelomeric deletion (case 5), and 2 samples had whole-chromosome aneuploidy (cases 6 and 7). One dominantly inherited disorder could be diagnosed by the detection of haploinsufficiency for the relevant gene (cases 8 and 9), and 3 cases involved carriers of a recessive allele: deletion at the NPHP1 [nephronophthisis 1 (juvenile); cases 10 and 11] and CTNS loci (case 12). The last 3 cases featured deletions of <100 kb, each of which covered defined disease genes.

[0283] Oligonucleotide-array CGH was able to detect cryptic rearrangements, submicroscopic alterations, and even single-gene deletions. The smallest imbalance event detected in this study was a heterozygous genomic deletion of 3 consecutive probes covering a minimal 23-kb interval. FIG. 2A shows the targeted array CGH data, and deletion of the 3 targets was confirmed by dye-swap hybridization (green in the forward hybridization and red in the reverse hybridization). In this case, we repeated the CGH analysis with AGILENT's 244K whole-genome oligonucleotide array and confirmed the deletion, which includes the entire CARKL (carbohydrate kinase-like) gene and part of CTNS (FIG. 2B). The partial deletion of CTNS was independently confirmed by MLPA analysis. FIG. 2C shows a 1-copy deletion for CTNS exons 2 and 6 and a typical dosage for CTNS exon 12. To further characterize the deletion, we amplified the deletion junction by the PCR and confirmed by sequencing (FIG. 2D) that the deletion detected by array CGH is the common “European” deletion associated with cystinosis (Forestier L, et. al., 1999, Am J Hum Genet; 65:353-9). This case further demonstrated the excellent resolution and sensitivity of the custom oligonucleotide-array CGH method.

### Genomic Imbalance Probably Cause a Disorder

[0284] Table 1B lists 5 samples with interstitial deletions/duplications that may be clinically relevant. The list includes 3 interesting cases: a 3.6-Mb duplication at 17p11.2, which is similar to that of a recently reported 17p11.2-duplication syndrome (Potocki L, et. al., 2007, Am J Hum Genet., 80:633-49), and 2 cases of a 546-kb de novo deletion at 16p11.2, which is within a region of frequently observed cytogenetic polymorphism but is not observed in the CNV database. Neither individual with the de novo 546-kb 16p11.2 deletion had specific dysmorphic features, but the absence of this deletion in the parents suggests that the deletion is responsible for the phenotype of developmental delay.

Genomic CNVs with Unknown Significance

[0285] Nine patients had unreported CNVs with relatively small genomic deletions of between 50 and 200 kb (data not shown). The clinical significance of these imbalance events is unclear. Although this custom oligonucleotide array was designed to avoid CNVs, many new CNV loci have been reported since the design of the array, which can be found at the world wide web at http “colon” “double forward slash” projects “period” tcag “period” ca “forward slash” variation “forward slash”.

[0286] Array CGH is a valuable clinical diagnostic assay for patients with mental retardation and other genetic conditions. Although high-resolution whole-genome oligonucleotide microarrays are commercially available for research, targeted array CGH offers several advantages in a clinical diagnostic laboratory (Bejjani B A, et. al., 2005, Am J Med Genet A, 134:259-67). Genomic regions with well-documented clinical relevance were chose, analogous to those of the currently accepted BAC-based arrays designed by the leading array CGH laboratories (Baylor College of Medicine. Chromosomal Microarray Analysis; Signature Genomic Laboratories). Genomic imbalance identified on the targeted oligonucleotide array can be verified with existing FISH or MLPA probes, whereas secondary methods are not readily available for a whole-genome array.

[0287] Using 60-mer oligonucleotide probes that are synthesized robotically in situ to manufacture the oligonucleotide-based arrays, we were able to eliminate variability in BAC inserts or DNA contamination between batches and potentially affecting the reproducibility and consistency of the manufactured BAC-based arrays. Moreover, the 60-mers have a fixed GC content and melting temperature that facilitate uniform hybridization, thus reduces the amount of the variability in the performance of some probes.

[0288] The sensitivity and specificity of the oligonucleotide-array platform were excellent because of the high SNRs and low SDs. The SDs of all targets were observed to be consistently <0.1—with the majority being <0.08—with this oligonucleotide-based array. Given the nice separability of imbalance events above the baseline, we can identify genomic-imbalance events with a high level of confidence. In addition to the 100% concordance between the oligonucleotide-array CGH results and the results generated by other methods for both positive and negative samples, it was possible to identify smaller imbalance events (unreported CNVs; data not shown) that were not detected with other methods.

[0289] Oligonucleotide platforms can quickly and easily accommodate changes in genomic coverage. Manufacturing costs are not prohibitive and the list of available probe sequences extends the length of the genome. Thus, updates to oligonucleotide-based arrays can be accomplished more quickly and with less postproduction validation than BAC-based arrays, which require new BAC clones to be individually validated and DNA to be prepared from each clone before chips can be manufactured.

[0290] This focused oligonucleotide-based array CGH platform detected all genomic-imbalance events in the 65 validation samples, with 100% concordance with BAC-based array CGH, FISH/karyotyping, or MLPA. Coverage of clinically relevant loci (see Supplemental Data 1 in the online Data Supplement) is equivalent to other BAC-based targeted array CGH platforms. The enhanced sensitivity and specificity of oligonucleotide-array CGH compared with other methods are attributable to better resolution and the custom design, respectively.

### Example 2

[0291] Autism is a pervasive developmental disorder defined by a neurobehavioral phenotype that includes social disability, communication impairment, repetitive behaviors, and restricted interests.

[0292] The relative genetic contribution to a susceptibility to autism from de novo mutations, rare mutations, and common polymorphisms has been debated extensively (Zhao X, et. al., 2007, Proc Natl Acad Sci USA, 104:12831-12836). Recent whole-genome studies assessing copy-number variation4 reported an excess of large de novo copy-number variants, with such events reported in 7 to 10% of simplex families, 2 to 3% of multiplex families, and only 1% of control families (Szatmari P, et. al., 2007, Nat Genet, 39:319-328; Sebat J, et. al., 2007, Science, 316:445-449). Although these data imply a role for de novo copy-number variation, no recurrent events were identified and implicated as having an unequivocal association with autism.

[0293] A high-resolution genomewide analysis of a sample of multiplex families in the Autism Genetic Resource Exchange (AGRE) (Geschwind D H, et al., 2001, Am J Hum Genet, 69:463-466) was carried out with the use of the AFFYMETRIX® 5.0 genotyping platform. This platform offers not only single-nucleotide polymorphism (SNP) probes but also a dense collection of SNP invariant probes, which combine to enable detection of copy-number variation. In this study, we describe a screening technique for recurrent de novo autosomal copy-number variants that could influence susceptibility to autism with follow-up analysis of clinical genetic-testing data from Children's Hospital Boston and a large population sample from Iceland (studied at DECODE™ Genetics).

### Materials and Methods

### Study Design

[0294] The samples and methods that were used are summarized in Table 4.

### AGRE

### Samples

[0295] The Autism Genetic Resource Exchange (AGRE) has a collection of DNA from multiplex families with autism spectrum disorder (ASD) available for genetic research (Geschwind D H, et al., 2001, Am J Hum Genet, 69:463-6). 751 families were genotyped. Families with at least one child diagnosed with autism by the Autism Diagnostic Interview-Revised (ADI-R) (Lord C, et al., 1993, Infant Mental Health, 14:234-52) were select, while the second affected child had an AGRE classification of autism, broad spectrum (patterns of impairment along the spectrum of pervasive developmental disorders, including PDD-NOS and Asperger's syndrome) or Not Quite Autism (NQA, individuals who are no more than one point away from meeting autism criteria on any or all of the social, communication, and/or behavior domains and meet criteria for “age of onset”; or, individuals who meet criteria on all domains, but do not meet criteria for the “age of onset”). The self-reported race/ethnicity of these samples is 69% white, 12% Hispanic/Latino, 10% unknown, 5% mixed, 2.5% each Asian and African American, less than 1% Native Hawaiian/Pacific Islander and American Indian/Native Alaskan.

[0296] Families with known chromosomal abnormalities (where karyotyping was available) were excluded, and those with inconsistencies in genetic data (generating excess Mendelian segregation errors or showing genotyping failure on a test panel of 24 SNPs used to check gender and sample identity with the full array data) also were excluded. The final dataset included 1,441 affected individuals (1,252 autism, 123 broad spectrum, 66 NQA), 1,420 parents, and 132 unaffected/unknown siblings (Table 4). Some of these same samples were analyzed on AFFYMETRIX® 500K and 5.0 arrays at Johns Hopkins, and analyzed for copy number using AFFYMETRIX® CNAT 4.0 software.

### Controls

[0297] Additional samples from other ongoing studies used as controls for this study were 1087 cases with bipolar disorder from STEP-BD and 1727 controls obtained from the NIMH Genetics Repository genotyped on the AFFYMETRIX® 500K platform (Sklar P, et al., 2008 Mol Psych. In Press.), and analyzed for CNVs with COPPER (see below).

### Genotyping

[0298] The samples were genotyped on AFFYMETRIX® 5.0 chips at the Genetic Analysis Platform of the Broad Institute. The 5.0 chip was designed to genotype nearly 500,000 SNPs across the genome in order to enable genome-wide association studies, as well as to improve the assessment of dosage changes by adding 500,000 sequence invariant probes (100,000 of which were targeted towards 1,900 regions of known common copy number polymorphism). In this study, the raw intensity data from these chips is analyzed with two novel algorithms, COPPER and Birdseye, described below. In addition to standard quality control of scans, intensity data was examined for excess variance after normalization. Genotype calling (used here for allele normalization) and quantile normalization of arrays was performed within Birdseed or BRLMM. Both the genotype data and raw intensity files have been released to AGRE, and are available to the research community under AGRE guidelines.

### Analysis COPPER

[0299] COPy number Polymorphism Evaluation Routine (COPPER, developed by LAW, MARF with technical assistance from DMR) is a method that utilizes allele-specific intensity data from SNP probes to estimate copy number across the genome. It leverages large sample sizes in normalization and can detect small recurrent events in the population (including those that encompass only two local SNP probes). Additionally, it summarizes information from neighboring SNPs per individual to detect larger events (at least six SNP probes) present in single or few samples. Furthermore, COPPER can output normalized intensity data for verification of events by visual examination.

[0300] Briefly, it involves 4 steps: 1) normalization of intensity data, 2) copy number calling for each SNP probe, 3) consensus calling for pairs of nearby SNPs, and 4) summarizing data into copy number events. 1) Allele-specific intensity data is normalized and scaled to reflect copy number by assuming that the median intensity for allele A in individuals genotyped as AA corresponds to two copies, the median intensity for allele A in individuals genotyped as AB corresponds to one copy, and the median intensity for allele A in individuals genotyped as BB corresponds to zero copies; likewise for allele B. 2) After adjusting each individual to a genome-wide average of copy number two, the allele-specific quantitative estimates are converted into integer calls of zero to four for each allele and summed across alleles for a copy number call at each locus. 3) Then ‘consensus markers’ are created by comparing copy number calls for each SNP with the most correlated flanking SNP (considering three on each side), and creating one marker from that pair by setting conflicting calls to missing. Each SNP cannot be used more than once to create a consensus marker. 4) Next, each individual is scanned in windows of five consensus SNPs (stepping by two), and a copy number variant is called if three of the markers in the window are consistent with deletion (copy number <2) or duplication (copy number >2). Therefore, a minimum of six SNPs (3 consensus markers) must reflect copy number less than or greater than two to make a CNV call, reducing false positive calls. Finally, these window calls are summarized into events in each individual with estimated boundaries, and overlapping events are summarized into regions of copy number variation across the sample, with output indicating the number of cases and controls with CNVs in each region, odds ratio, number of positive markers, etc. This method will be described in more detail in a subsequent publication.

[0301] Birdseye (developed by JMK) uses both the SNP and copy number probes available on the AFFYMETRIX® 5.0 array to detect copy-number variants (CNVs). On an individual by individual basis, it considers the intensity deviation of each probe using models built from copy number differences on the X chromosome. Birdseye then identifies regions of dosage abnormality in individual samples by combining probe information using a Hidden Markov Model with five states (dosage=0, 1, 2, 3, 4) and employing the standard Viterbi algorithm (Viterbi A. 1967, IEEE Trans Inform Theory, 13:260-9), and generates LOD scores expressing the likelihood of deviation from copy number two in any region. Scans for de novo deletion and duplication events were performed by requiring LOD>6 (i.e., million to one odds) in favor of deletion/duplication in the child but no deletion/duplication in either parent (also with LOD>6).

[0302] Briefly, each locus on each plate is modeled independently using empirical data. The response characteristics of each probe are maximum likelihood estimates of mixtures of Gaussians, assuming most samples have normal copy number at that locus. The response of copy number probes is a single Gaussian that best explains the distribution of sample intensities observed, while for SNPs the response is a mixture of 3 Gaussians which are learned using Birdseed (the SNP genotyping algorithm). These Gaussians define the copy-normal clusters. Copy-variable clusters (locus responses) are imputed from these, using a linear regression model built from chromosome X probes (which show differential response for haploid males versus diploid females). Each sample is then independently analyzed using a 5-state HMM-one state per copy number (where copy number at each locus is assumed to be 0, 1, 2, 3, or 4). The models for individual probes serve as point-estimates for the probability of being in each potential copy number state. The transitional probabilities are set low (0.0002 to transition from 2 to variable copy number, 0.05 to transition back to normal copy number, and 0.0001 to transition between two different copy variable states) to reflect the low expected number of CNVs in each genome. The Viterbi best path of copy number states along the genome is then computed for each sample, and for each discovered event a LOD score is reported that reflects the relative probability of the event being true versus false given the observed data.

[0303] To assess performance, an in-silico gender mixing experiment was performed. For each probe on the X chromosome, mixture models were built using only female data from a single plate. The order of probes was randomly permuted in order to remove any true CNVs present. A deletion was then simulated by taking the intensity of a female sample for 200 consecutive probes, followed by the intensity of a male sample for N probes, and then another sequence of 200 probes for which female intensity was used (where N is 0, 3, 5, 10, or 20). Each deletion size was simulated 1000 times.
[0304] 3 probe deletions:
[0305] 30% found; 28% if limit to correct breakpoints within 1 probe median LOD 1.13 (mean 1.32)
[0306] 55% of those found have LOD>1
[0307] 5 probe deletions:
[0308] 75% found; 71% if limit to correct breakpoints within 1 probe median LOD 2.42 (mean 2.70) 80% of those found have LOD>1 10 probe deletions:
[0309] 98% found; 93% if limit to correct breakpoint within 2 probes
[0310] median LOD 7.80 (mean 7.98) 99% of those found have LOD>1 20 probe deletions:
[0311] 99% found; 93% if limit to correct breakpoint within 2 probes
[0312] median LOD 19.95 (mean 20.00) 99% of those found have LOD>1

[0313] Two (false positive) duplications with LODs of 0.19 and 1.16 were found in the simulation, which covered 2,000,000 non-deleted probes (approximately 1 full genome's worth of data). No false deletions were found.

### Children's Hospital Boston Samples

[0314] Array comparative genomic hybridization (CGH) was performed on 997 consecutively submitted clinical samples, after referral by specialists in Clinical Genetics, Neurology, and Developmental Medicine at Children's Hospital Boston. These fell into two groups: 512 had a primary diagnosis of developmental delay (DD), mental retardation (MR), and/or autism spectrum disorder (ASD) without noted dysmorphic features and 485 were referred for a primary diagnosis other than DD, MR or ASD. In the first group, 129 had ASD as primary indication by the referring clinician, 373 had DD as primary indication, and most have not been formally assessed for ASDs. Among the second group of 485, major referral categories included 141 with a primary diagnosis of multiple congenital anomalies, 106 with dysmorphic features, 43 with seizures, and 41 with congenital heart disease. Of these 485, 51 had a secondary diagnosis of DD or MR and were therefore excluded from analysis, leaving 434 non ASD/DD/MR controls (Table 4). More detailed clinical information about cases with aberrations at 16p1 1 was obtained by medical records review after approval by Children's Hospital Boston IRB.

### Array CGH and Analysis

[0315] AGILENT's 244K human genome oligonucleotide CGH microarrays (G441 1 B, AGILENT Technologies, Palo Alto, Calif.) were used for array CGH analysis at Children's Hospital Boston (Shen Y, et al., 2007, Clin Chem, 53(12)). Test samples labeled with Cy5 were compared to a reference sample labeled with Cy3 for standard two-color array CGH or vice-versa in reverse dye labeling setting. Images were captured by an AGILENT scanner and quantified using FEATURE EXTRACTION software v9.0. CGH analytic software v3.4 was subsequently used for data normalization, quality evaluation and data visualization. Copy number aberrations were indicated using the ADM-2 (Aberration Detection Method 2) algorithm.

### Multiplex Ligation-Dependent Probe Amplification (MLPA) and Fluorescent In Situ Hybridization (FISH) Design and Analysis

[0316] To independently confirm the deletion/duplication of 16p1 1.2 region, four pairs of MLPA target-probes were designed based on the unique sequences of four genes within this interval: SPN, MAZ, TAOK and TBX6. Additionally, four pairs of MLPA control probes were included, two pairs corresponding to unique sequences of SEPT1 and LAT genes located on chromosome 16 outside the deletion interval, and two pairs corresponding to unique sequences on other chromosomes. All probes were synthetic oligonucleotides. M LPA reagents were commercially available (M RC-Holland, Amsterdam, Netherlands), and reactions were performed according to the manufacturer's instructions. Final PCR products were analyzed on an ABI3730XL for peak identification and quantification. Copy number alterations were visually inspected by superimposing the peak profile of a test sample with the profile of a normal sample using SoftGenetics GENEMARKER software (SoftGenetics, LLC. State College, Pa.) as shown in FIG. 3C. For actual copy number quantification, the peak areas were exported to a Microsoft Excel worksheet. Peak area for each probe was normalized to the mean value for all control probes. The relative ratio of each peak was calculated by comparing between test sample and normal sample. Deletion was identified as relative ratio<0.75 and duplication as relative ratio>1.25.

[0317] FISH confirmation was performed as described previously 5 using BAC clone RP11-50412 as a probe specific to the 16p11 .2 deletion interval.

### DECODE™ Iceland Samples

[0318] Searching for sequence variants affecting the risk of autism was done through a population study of autistic individuals ascertained through the State Diagnostic Counseling Center and the Department of Child and Adolescent Psychiatry in Iceland. 299 cases were investigated and for 90% of them the parents or caregivers of each affected individual were queried using the Autism Diagnostic Interview-Revised (ADI-R 2) (Table 4). The rest of the group (10%) is comprised of older individuals diagnosed according to the ICD-9 (WHO 1978) criteria for autism. For this study, all ICD-9 diagnoses were converted by clinical specialists to ICD-10 diagnoses (World Health Organization. The ICD-10 Classification of Mental and Behavioural Disorders. Diagnostic criteria for research. Geneva 1993). The diagnostic evaluation also included cognitive/developmental assessment, medical work-up and consultation with child and adolescent psychiatrist and/or developmental pediatrician.

[0319] All sample and data collection connected to the project, and relevant control samples, has been conducted by a licensed patient recruitment center (PRC). The PRC is a separate, not-for-profit trust company that serves as a link between study participants and researchers. This is where encryption of all research material takes place. The PRC is staffed with experienced nurses who work closely with the clinicians in the recruitment process using the same approach. The DNA samples were isolated from whole blood by conventional methods.

[0320] All participants, cases and controls, returned signed informed consents prior to participation in the study. All personal identifiers associated with medical information, questionnaire results, and blood samples were encrypted according to the standards set by the Data Protection Committee of Iceland (Gulcher J R, et. al., 2000, Eur J Hum Genet, 8:739-42). All procedures related to this study have been approved by the Data Protection Authority and National Bioethics Committee of Iceland.

### Genotyping and Analysis

[0321] A total of 24,258 Icelandic individuals were genotyped at DECODE™ Genetics for 317,503 SNPs using the SENTRIX® HumanHap300 BeadChip (ILLUMINA®). Deletions and duplications at 16p11 were detected using a Hidden Markov Model applied to the SNPs normalized intensity data (similar to the approach described in Colella S, et. al., 2007, Nucleic Acids Res; 35(6):2013-25).

### Statistical Methods

[0322] The Fisher's Exact Test was used to compare carrier frequency between cases and controls.

### Replication

[0323] Children's CGH sample was identified in advance as part of collaborative work supported by the Autism Consortium. DECODE™ Genetics researchers (RF, ES, HS, KS) contacted MJD after presentation of preliminary results at recent scientific meeting with offer to replicate this finding. We know of no additional replication attempts at this time.

[0324] These novel methods have good power to detect deletions spanning at least 10 probes (approximately 30 kb) on the AFFYMETRIX® 5.0 platform. AGRE samples only from persons without known chromosomal anomalies, the fragile X syndrome, and other established syndromes were screened.

[0325] The study was approved by the institutional review boards at the Massachusetts Institute of Technology (for the AGRE samples) and Children's Hospital Boston (for the Children's Hospital samples) and by the Data Protection Authority and National Bioethics Committee of Iceland (for the DECODE™ samples). Written informed consent was obtained from all subjects in the AGRE and DECODE™ research studies. Children's Hospital Boston carried out comparative genomic hybridization for clinical diagnostic purposes; since results were anonymous and obtained by chart review, research-based informed consent was not required by the institutional review board that approved the study.

### Results

### Copy-Number Abnormalities

[0326] To discover recurrent deletions or duplications conferring a risk of autism in multiple families, the COPPER algorithm was used to identify regions in which three or more patients with autism had overlapping copy-number (or genomic “dosage”) abnormalities—that is, regions that had either fewer than or more than two genomic copies were targeted in this study. To ensure that these regions were not sites of common copy-number polymorphism, the study was focused on regions that were variant in less than 1% of parents of subjects with autism. For each event predicted by COPPER and meeting these criteria, visual inspection of intensity data was used, whether the same event was predicted with Birdseye, and analysis of mendelian inheritance to assess the confidence in the observation.

[0327] 32 high-confidence regions and 15 lower-confidence regions were identified, and all but 1 of these regions appeared to be normally segregating variants. Of these regions, 16 (including 8 with high confidence) had at least one de novo event in which both parents were negative for the copy-number variant, suggesting the possibility of recurrent mutation. Although the majority of these variants did not cosegregate with autism (and probably constitute rare, neutral copy-number variations), one region stood out as having multiple de novo events and no inherited events.

### Microdeletion on Chromosome 16p11.2

[0328] A region on chromosome 16p11.2 (from genomic coordinates 29.5 Mb to 30.1 Mb) was unique in our data. Five children (four boys and one girl) with autism in four independent families carried de novo deletions; we observed no deletions in the parents. One pair of siblings who were not monozygous twins shared the de novo event, presumably inherited from a parent with germ-line mosaicism. In the children with autism, it was observed that the 16p11.2 deletion occurred on chromosomes derived from both the mother and the father.

[0329] The region coincides perfectly with a segment of 593 kb flanked by a 147-kb segmental duplication with 99.5% sequence identity. The identification of this cluster of de novo events by COPPER was confirmed by analysis of the same data with the use of Birdseye, with perfect agreement in identification of five samples with this deletion (FIGS. 3A and 3B). In addition, three of these samples overlapped with subjects who were genotyped at Johns Hopkins with AFFYMETRIX® 500K chips in an autism sample (provided by the National Institute of Mental Health), where the same deletions were identified by CNAT 4.0 (AFFYMETRIX®). The size of these deletions (593 kb, containing 86 distinct sites with SNP or copy-number probes) generates confidence that this observation is genuine, with all five subjects having a logarithm of the odds (LOD) of more than 50 in favor of a dosage of 1 (i.e., a hemizygous deletion) (Table 6). The deletion was not observe in the parents of these five children (LOD >50 in favor of a normal dosage of 2 in all parents), nor was the deletion observed in any of the 1420 parents in this study.

[0330] Deletion and normal dosage were positively confirmed by multiplex ligation-dependent probe amplification (MLPA) for all subjects in all four of these AGRE families (FIG. 3C). However, in 2814 samples from other studies (unpublished data), three female control subjects (who participated in a study of bipolar disorder but were not screened for autism) carried the deletion. The deletion rate in this population is much lower than the rate in the sample of children with autism (P=0.03 for the deletion), although it suggests that the deletion does not cause severe autism in every case.

Duplication in Families with Autism

[0331] Reciprocal duplication of the 593-kb deleted region was observed in three AGRE families (with at least one family member with a LOD>30) (FIG. 3). This duplication was inherited in two families: it was transmitted from a parent to two of two affected offspring (male and female) as well as to one unaffected daughter and from another parent to four of four affected sons. In the third family, the duplication appeared to be a de novo event in one of two affected male offspring. The full duplication was not observed in any of the 2814 samples from other studies analyzed and thus appears to be a high-penetrance risk factor conferring risk to seven additional subjects with autism in the AGRE sample (P=1.1×10⁴ for both deletions and duplications) (Table 4 and Table 6).

### Additional Duplications in AGRE Families

[0332] Five large duplications of three different sizes in the 15q11-13 region associated with the Prader-Willi and Angelman syndromes were identified (Table 5). Of these duplications, one was maternally inherited, one occurred in a subject whose father had a normal dosage and whose mother was unobserved, and three were de novo duplications; the smallest extended from genomic position 23 Mb to 25 Mb on chromosome 15. This relatively small duplication could help to focus candidate-gene studies since it included only two genes—ATP10A and GABRB3.

[0333] de novo deletion or duplication of a recently implicated gene, NRXN1 on chromosome 2 (Szatmari P, et al. 2007, Nat Genet, 39:319-328; Kim H-G, et al. Am J Hum Genet, 2008, 82:199-207) was not observed although it was observed that six families had deletions within the NRXN1 locus. The deletions did not cosegregate with autism in four of the six families (i.e., not all affected persons inherited the deletion) and were not associated with autism on the basis of a transmission disequilibrium test. Deletions at this locus were observed in 5 of the 2814 control samples. Other events coincident with regions that were highlighted in two recent studies (Szatmari P, et al. supra; Sebat J, et al. 2007, Science, 316:445-449) are listed in Table 7.

[0334] To obtain a more complete tally of potentially causal recurrent events, the Birdseye algorithm was used to search for de novo deletions and duplications of 20 kb or larger in genomewide data obtained from the AGRE samples. No additional de novo events was found in multiple subjects that were not observed in the International HapMap Project or in 2814 samples from control subjects. Although approximately 50 de novo events of more than 100 kb that were not seen in HapMap were detected, a number of these events did not cosegregate with autism in other families or they have been observed in samples from subjects who did not have autism; all such events require further study in additional subjects and much larger control samples before those that may confer susceptibility can be identified.

### Confirmation in Clinical Samples

[0335] Replication of the association between the 16p11.2 microdeletion and autism was tested in a sample of 512 children with developmental delay, mental retardation, or autism spectrum disorder who were identified independently at Children's Hospital Boston with the use of comparative genomic hybridization. Five additional 16p11.2 deletions were identified (all in boys, including one pair of monozygotic twins); the boundaries of the deletion in each case were identical to that described above (FIG. 3 and Table 8). One deletion was inherited from a mother with mild mental retardation, and the rest were de novo.

[0336] By contrast, no deletions of this region were observed in samples from 434 patients at Children's Hospital Boston that were tested by comparative genomic hybridization in the same laboratory. Samples from these children were submitted for diagnostic testing because they had dysmorphic features, multiple congenital anomalies, congenital heart disease, seizures, or other phenotypes in which developmental delay, mental retardation, or autism spectrum disorder was not indicated by the ordering physician.

[0337] The duplication at 16p1.2 was also observed in four independent samples (two from boys and two from girls) from the 512 children who were tested with the use of array comparative genomic hybridization for developmental delay, mental retardation, or autism spectrum disorder; the duplication was not observed in any of the 434 children who were tested for other diagnoses. This finding significantly reinforces the association of dosage abnormalities at 16p11.2 and phenotypes associated with autism spectrum disorder and developmental delay (P=0.007 for both deletions and duplications) (Table 9). Clinical features are described in Table 9. All deletions and duplications in this sample were positively confirmed with the use of MLPA and fluorescence in situ hybridization (FISH) (FIG. 3C and data not shown).

### Replication in an Icelandic Sample

[0338] It was observed that 3 of 299 subjects with autism spectrum disorder from Iceland carried the 16p11.2 deletion, a finding that was consistent with the 1% frequency observed in children at Children's Hospital Boston who had sporadic developmental delay or autism spectrum disorder (Table 10). One of these deletions was de novo, the origin of the second deletion was not known, and one was inherited from a father who had attention deficit-hyperactivity disorder (ADHD). By contrast, in a control sample of 18,834 subjects who did not undergo screening for a psychiatric or language disorder, only two deletions were observed—in other words, the deletion was observed more often in patients with autism by a factor of 100 (P=3.7×10⁻⁵). However, in a study of the same population by investigators at DECODE™ Genetics, this deletion was observed at a markedly increased rate in subjects with a psychiatric or language disorder. This study showed that the deletion was present in 1 of 648 patients with schizophrenia, 1 of 420 patients with bipolar disorder, 1 of 203 patients with ADHD (the father of a child with autism, as noted above), and 1 of 3000 patients with panic disorder, anxiety, depression, or addiction. In addition, 1 of 748 patients with dyslexia carried the deletion. Overall, in the Icelandic samples, the carrier frequency among patients with autism was 1%; the frequency was approximately 0.1% among patients with a psychiatric or language disorder and 0.01% in the general population.

[0339] The duplication of this region was not observed in any of the Icelandic subjects with autism spectrum disorder but was observe it in two subjects with bipolar disorder and five unscreened control subjects, with a carrier frequency of 0.04% in subjects with a psychiatric or language disorder and in 0.03% of the general population.

[0340] In total, the identical deletion of nearly 600 kb was observed in 13 subjects with autism (10 confirmed de novo mutations, 2 confirmed inherited mutations from parents with ADHD or mental retardation, and 1 mutation of unknown inheritance), with the reciprocal duplication of the same region documented in 11 additional subjects.

[0341] In conclusion, regions of rare copy-number variation have been identified in families with autism. In addition, there is an association between a microdeletion on chromosome 16 (and the inherited reciprocal duplication) and autism. Both the deletion and the duplication are likely to be mediated by the 147-kb segmental duplication flanking the deleted or duplicated sequence.

### Example 3

[0342] Recurrent microdeletion or microduplication events are a common cause of developmental delay and mental retardation (Shaw-Smith C, et al., 2004, J Med. Genet., 41(4):241-8; Schoumans J, et al., 2005, J Med Genet, 42(9):699-705). Most of these events are mediated by recombination between segmentally duplicated sequences through an established mechanism of non-allelic homologous recombination, or NAHR (Lupski J R. 1998, Trends Genet; 14(10):417-22). Microdeletion or microduplication through intrachromosomal recombination between segmentally duplicated sequences is an established mechanism associated with congenital developmental disorders such as the Smith-Magenis syndrome, the Williams syndrome, the Potocki-Lupski syndrome (17p11.2 duplication), and the DiGeorge syndrome (22q11 deletion). The goal of this study is aimed at discovering microdeletion or microduplication that are associated with autism.

### Materials and Methods

### Children's Hospital Boston Samples

[0343] Whole genome high resolution oligonucleotide array CGH were performed on 1,445 consecutively submitted clinical samples with referring diagnoses including developmental delay (DD; n=639), mental retardation (MR) or learning disability (LD; n=49 for MR/LD), autism spectrum disorder (ASD; n=177) or pervasive developmental disorder (PDD; n=85; total for ASD/PDD=262), multiple congenital anomalies (n=118), dysmorphic features (n=224), seizures (n=49) or undefined/other phenotypes (n=104). All patients with 15q13 imbalance were examined by a developmental specialist and a clinical geneticist. A team of specialists from Clinical Genetics, Neurology, and Developmental Medicine at Children's Hospital Boston conducted a medical record review approved by the Children's Hospital Boston Institutional Review Board (IRB).

### Array CGH and Confirmatory Studies

[0344] CGH was performed according to previously published methods of analysis using the AGILENT 244K human genome oligonucleotide CGH microarray; all coordinates reflect human genome build 18 (G4411B, AGILENT Technologies, Palo Alto, Calif.) (Shen Y, et al., 2007, Clin Chem., 53:2051-9). Independent confirmation of deletion/duplication of the 15q13.2q13.3 region was performed by multiplex ligation-dependent probe amplification (MLPA) and fluorescence in situ hybridisation (FISH) according to previously described methods (Shen Y, et al., supra).

### AGRE Samples

[0345] DNA samples from 751 multiplex families were obtained from the Autism Genetic Resource Exchange (AGRE) collection of multiplex families (Geschwind D H, et al., 2001, Am J Hum Genet., 69:463-6) using previously described sample selection criteria (Weiss L A, et al., 2008, N Engl J Me., 358:667-75). The final dataset included 1,441 individuals affected with autism spectrum disorders, 1,420 parents, and 132 unaffected/unknown siblings. This study was approved by the Massachusetts Institute of Technology (MIT) IRB.

### Genotyping and Confirmatory Studies

[0346] AGRE samples were genotyped on AFFYMETRIX™ 5.0 arrays at the Genetic Analysis Platform of the Broad Institute, and analyzed for copy number variants with the COPPER and Birdseye algorithms (Weiss L A, et al., 2008, N Engl J Me., 358:667-75; Korn J M, et. al., Submitted 2008). SNP genotype data and raw intensity files have been released to AGRE, and are available to the research community under AGRE guidelines. Independent confirmation of deletion/duplication of the 15q13.2q13.3 region among AGRE samples was performed using AGILENT 244k array CGH and MLPA at Children's Hospital Boston.

### Methods for MLPA

[0347] Independent confirmation of deletion/duplication of the 15q13.2q13.3 region was performed using four pairs of multiplex ligation-dependent probe amplification (MLPA) probes based on unique sequences of four genes within this interval: MTMR15, TRPM1, OTUD7A and CHRNA7. The assay included seven pairs of MLPA control probes, three pairs corresponding to unique sequences of TJP1, CHRFAM7A and RYR3 genes located on chromosome 15 outside the deletion interval, and four pairs corresponding to unique sequences on other chromosomes. All probes were synthetic oligonucleotides. MLPA reagents were commercially available (MRC-Holland, Amsterdam, Netherlands), and reactions were performed according to the manufacturer's instructions.

### Results

[0348] Ten patients with genomic imbalance at chromosome 15q13.2q13.3, including five with BP4-BP5 microdeletions from the CHB cohort (chr15:28.7 Mb to about 30.3 Mb; hg18) were identified. No cases of BP4-BP5 microdeletion among 1,420 parents and 132 unaffected/unknown siblings in the AGRE samples were found. Three patients with reciprocal BP4-BP5 duplications; and two siblings with a smaller duplication of about 500 kb within BP4-BP5 (chr15:28.9-29.4 Mb; hg18; FIG. 4) were identified. BP4 is more than 1 Mb distal to the telomeric breakpoint (BP3) of the 15q11q13 deletion associated with PWS/AS and the reciprocal duplication that has been associated with autism. None of the patients from CHB or AGRE had other clinically significant copy number variants elsewhere in the genome. All CHB patients had normal karyotypes and fragile X testing by Southern blot and PCR. All deletion and duplication events in these samples were confirmed by dye reversal array CGH (FIG. 4) and through a customized FISH or MLPA assay (data not shown and FIG. 5). Genomic coordinates of the deletions and duplications associated with autism are listed in Table 11.

[0349] In general, cognitive performance of patients with 15q13.2q13.3 microdeletion/microduplication was variable. Test scores ranged from moderate MR to the normal range. Although some patients had full-scale IQ in the normal range, they all had some degree of language impairment and/or learning disability. Expressive language was consistently more delayed than receptive language. Many of these individuals showed capacity for ongoing improvement in academic and social skills. Neurobehavioral symptoms were very common in microdeletion/microduplication patients. All had difficulties with social interactions. Overall, dysmorphic features were mild (data not shown), and the neurobehavioral symptoms were the most significant cause of disability among these patients.

### 15q13.2q13.3 Microdeletion Patient

[0350] Clinical features of the one individual (patient 3) from the CHB cohort with 15q13.2q13.3 BP4-BP5 deletions are presented in Table 11. All have subtle dysmorphology findings based on examination by a clinical geneticist. Cognitive testing was performed on the individual. Patient 3 showed significant nonverbal learning disability but has no history of developmental regression. There is mild impaired language skills. Profiles commonly included developmental or oro-motor dyspraxia with disarticulation.

[0351] Motor delays were not prominent, especially compared to cognitive and behavioral issues, but were observed among in patient 3 with BP4-BP5 deletion. Patient 3 had hypotonia that resolved over time. Patient 3 with BP4-BP5 deletion had exam findings that is not consistent with cerebral palsy.

[0352] Patient 3 with BP4-BP5 deletion has a diagnosis of an autism spectrum disorder. Autistic features such as variably poor eye contact and other difficulties with social interactions. Beyond concerns about autistic features, patient 3 has ADHD, bipolar disorder, and anxiety disorder but have no problem sleeping at night.

### 15q13.2q13.3 Microduplication Patients

[0353] Clinical features of four individuals from the CHB and AGRE cohorts with 15q13.2q13.3 BP4-BP5 duplications are presented in Table 11. They have a diagnosis of autism. Patients 6 and 8 also have severe expressive language delay, but language testing results were not available on Patients 9 and 10. Patient 6 has a history of anxiety spectrum disorder/obsessive-compulsive disorder in addition to autism. Cognitive and behavioral test results are not available for duplication patients from the AGRE cohort, although Patient 8's Vineland Score suggests he would fall in the range of mental retardation. Clinical examination of Patient 6 did not suggest a consistent pattern of dysmorphology and neither had a history of seizures. Patients 8-10 (AGRE cohort) were not available for exam.

[0354] Patient 6 (CHB cohort) and Patient 8 (AGRE cohort) have a de novo duplication and an autism diagnosis. Patients 9 and 10 (AGRE cohort) are siblings with autism and a smaller duplication nested within BP4-BP5 inherited from their apparently unaffected mother. Clinical information for 15q13.2q13.3 BP4-BP5 microdeletion cases

### Patient 3

[0355] Patient 3 is a 10 year 9 month Asian male with bipolar disorder, ADHD, generalized anxiety disorder, and a nonverbal learning disability. He has required medication with Depakote, Risperdal, and Cogentin.

[0356] He scored in the normal range of IQ. His Wechsler Intelligence Scale for Children-Fourth Edition (WISC-IV) scores were Verbal Comprehension 93 (32nd percentile), Perceptual Reasoning 90 (25th percentile), Working Memory 77 (6th percentile) and Processing Speed 93 (34th percentile), Full Scale IQ is 86 (18th percentile). His receptive language is mildly to moderately impaired while his expressive language is moderately impaired. Executive functions were compromised based on the Behavior Rating Inventory of Executive Function Global Executive Composite score of 87 (99th percentile).

[0357] He has particular difficulty with executive functions and has weak social skills. His play skills are particularly immature. He has difficulty reading social cues and interacting with other children. Behavioral problems include impulsivity, aggression, and anxiety. He has significant learning disabilities, attentional problems, and psychiatric symptoms, but not cognitive developmental delay. He has not had an ADOS.

[0358] Mild dysmorphic facial features include a slightly long midface, upslanting palpebral fissures, epicanthal folds, broad nasal root, and posteriorly rotated ears. Extremity exam is notable for tapering fingers, fifth finger clinodactyl), hyperextensible elbows, and pes planus. There were no neurocutaneous lesions. Neurological exam revealed only mild diffuse hypotonia with normal strength and deep tendon reflexes.

### Patient 6

[0359] Patient 6 is a 20 y/o Caucasian male with BP4-BP5 duplication and a diagnosis of autism, moderate mental retardation, and obsessive-compulsive disorder. His receptive language is moderately to severely impaired while expressive language is severely impaired. He is nonverbal, uses only a few signs, and uses keyboard and other communication aid with speech therapy. He has a history of repetitive behaviors (hand flapping; swinging; spinning) and poor eye contact. His social interactions are significantly impaired, and he has difficulty with transitions.

[0360] Dysmorphology exam revealed small midface and apparent frontal bossing due to the large cranium with deep set eyes. He is also significant for severe dental crowding and supernumerary teeth. He has a very tall narrow palate; narrow palpebral fissures, and hyperpigmetned macules on the penis which has led to a diagnosis of Bannayan-Riley-Ruvalcaba syndrome. Gene sequencing for PTEN was normal in clinical and research laboratories. At age 2-11/12, axial hypotonia noted, but tone was recorded as normal by age 7 y 1 m (at that time, noted to have tight heel cords). As a teenager, poorly cooperative for a neurological exam, but apparently nonfocal with a normal gait. He has no history of seizures and has not had an EEG other than a sleep study performed at age 7 which did not mention any abnormal EEG. He had a head CT at 6 months due to macrocephaly and an MRI at age 1 y that were both read as normal.

### Patient 8

[0361] Patient 8 from the AGRE repository is an 8 y male (mix of Caucasian and Africa American) with a de novo BP4-BP5 duplication and a diagnosis of autism based on the Autism Diagnostic Interview-Revised (ADI-R). This child had significant delays in expressive language with a performance level equivalent to 1 y 4 m at chronolofical age 7 y 7 m on the Vineland Adaptive Behavior Scales. This child had one sibling with autism who did not have the BP4-BP5 duplication. No additional phenotypic information was available.

### Patients 9 and 10

[0362] Patient 9 and 10 from the AGRE repository are Caucasian male siblings with a maternally inherited duplication of 502 kb (Chr15: 28902339-29404603; hg18; MTMR15, Interview-Revised (ADI-R). The mother who carries the same duplication is apparently unaffected. No additional phenotypic information was available.

[0363] The phenotype of chromosome 15q13.2q13.3 BP4-BP5 microdeletion/duplication syndrome can include features of autism spectrum disorder. Recognition of this broader phenotype has implications for clinical diagnostic testing and efforts to understand the underlying etiology of this syndrome.

TABLE 1
Genomic imbalance identified in clinical samples by oligonucleotide-array CGH and
confirmed with alternative methods.

| | Cytogenetics (FISH/karyotype), MLPA, whole-genome | |
|---|---|---|
| Genomic imbalance detected by focused oligonucleotide- | CGH/targeted PCR | |
| array CGH | Confirmation | |
| (A) Associated with disorders | | |
| 13qter gain, 20.7 Mb; 18qter loss, 5.6 Mb (partial | 46, XX, add(18)(q2?1.3) ish | Consistent |
| trisomy 13q and partial monosomy 18q) | der(18)t(13; 18)(D13S327+, 18qtel11−) | |
| 18pter-p11.21 loss, 13.4 Mb; 18p11.21 gain, 1.3 Mb (partial | 46, XX ish 18pter(D18S552 X 1), 18p11.21 (RP11- | Consistent |
| monosomy 18p and partial trisomy 18p) | 720L3 X 3) | |
| 17p11.2 loss, 3.6 Mb (Smith-Magenis syndrome) | 46, XX, ish del(17)(p11.2 p11.2) | Consistent |
| 1p36.21 loss, 1.8 Mb (1p36 deletion syndrome) | 46, XY, ish del(1)(p36.2) | Consistent |
| 4q35.2 loss, 1.1 Mb (autism spectrum disorder) | 46, XY, ish del(4)(qter−) | Consistent |
| X gain (aneusomy X) | 47, XXY | Consistent |
| Y gain (aneusomy Y) | 47, XYY | Consistent |
| Yp11.2 loss, 2.7 Mb: 2 cases | ish Yp11.2 (RP11-115H13 X 0) | Consistent |
| 2q13 loss, 100 kb (NPHP1 deletion): 2 cases | Confirmed by whole-genome array CGH | Consistent |
| 17p13 loss, 23 kb (CARKL and CTNS deletion; | Confirmed by whole-genome array CGH, MLPA, | Consistent |
| familial) | parental array CGH, and PCR flanking the deletion | |
| (B) Likely clinically relevant | | |
| 17p11.2 gain, 3.3 Mb | 46, XY, nuc ish 17p11.2 (RP11-363P3 X 3) | Consistent |
| 16p11.2 loss, 546 kb (de novo): 2 cases | 46, XY, ish del(16)(p11.2 p11.2) | Consistent |
| 15q13.3 gain, 1.5 Mb | nuc ish 15q13.3 (RP11-303I13 X 3) | Consistent |
| 5q22.1-q23.1 loss, 8.5 Mb | Confirmed by whole-genome array CGH | Consistent |

TABLE 2
Genomic Coverage with Oligo Array CGH (CHB Version 1.0)

| OMIM # | Region | Gene(s) | Associated Conditions |
|---|---|---|---|
| n/a | 41 sites | multiple | Subtelomeric del/dup for all chromosome arms |
| n/a | 43 sites | multiple | Marker chromosomes that contain a centromere |
| n/a | Aneuploidy | multiple | Aneuploidy for chromosomes 13, 18, 21, X, and Y |
| 253280 | 1p34.1 | POMGnT1 | Muscle-Eye-Brain disease |
| 607872 | 1p36 | DVL1 | Monosomy 1p36 |
| | 1q41-42.12 | multiple | Possible Congenital Diaphragmatic Hernia Locus |
| | 2p21 | SIX3 | Holoprosencephaly 2 |
| 164280 | 2p24.1 | MYCN | Feingold syndrome |
| 256100 | 2q13 del | NPHP1 | Nephronophthisis 1/Joubert 4 |
| | 2q22-23 | multiple | 2q22-23 del syndrome |
| 606708 | 2q31.1 | DLX1/DLX2 | Split-hand/foot malformation 5 |
| 186000 | 2q31.1 | HOXD13 | Synpolydactyly/Syndactyly I |
| 600430 | 2q37 | GPR35 | Albright hereditary osteodystrophy-like brachydactyly |
| 605934 | 2q37.1-37.3 | HPE6 | Holoprosencephaly 6 |
| 110100 | 3q22 | FOXL2 | Blepharophimosis, Ptosis, Epicanthus Inversus (BPES) |
| 220200 | 3q24 del | ZIC1 ZIC4 | Dandy-Walker malformation |
| 605289 | 3q28 del | TP73L | Split-hand/foot malformation 4 |
| | 3q29 del | PAK2, DLG1 | 3q29 del syndrome |
| 194190 | 4p16 del | WHS | Wolf-Hirschhorn syndrome |
| 180500 | 4q25 del | PITX2 | Rieger syndrome, Type 1 |
| | 4q32 del | | 4q32 del with autism |
| 122470 | 5p13.1 del | NIPBL | Cornelia de Lange syndrome |
| 123450 | 5p15.2 del | multiple | Cri-du-chat syndrome |
| 175100 | 5q22 del | APC | Familial adenomatous polyposis (FAP) |
| 117550 | 5q35.2-35.3 del | NSD1 | Sotos syndrome |
| 119600 | 6p21.1 del | RUNX2 | Cleidocranial dysplasia |
| 176270 | 6q16.3 del | SIM1 | Prader-willi-like syndrome |
| 175700 | 7p13-14.1 | GLI3 | Greig cephalosyndactyly |
| 101400 | 7p21.1 del | TWIST1 | Saethre-Chotzen syndrome |
| 194050 | 7q11.23 del | ELN | Williams-Beuren syndrome |
| 194050 | 7q11.23 dup | | Split-hand/foot malformation 1 |
| 142945 | 7q36.3 del | SHH | Holoprosencephaly 3 |
| | 8p22-p23.1 dup/del | | 8p22 del/dup syndrome |
| 222400 | 8p23.1 del | | Congenital Diaphragmatic Hernia 2 |
| 214800 | 8q12 del | CHD7 | CHARGE syndrome |
| 113650 | 8q13.3 del | EYA1 | Branchio-oto-renal syndrome (BOR) |
| 150230 | 8q24 del | TRPS1, EXT1 | TRPS, type 2 (Langer-Giedion) |
| 190350 | 8q24.12 del | TRPS1 | Trichorhinophalangeal syndrome, type 1 |
| 109400 | 9q22.3 del | PTCH | Basal cell nevus syndrome (Gorlin syndrome) |
| 161200 | 9q33.3 del | LMX1B | Nail-patella syndrome |
| 191100 | 9q34 del | TSC1 | Tuberous Sclerosis 1 |
| 236670 | 9q34.1 del | POMT1 | Walker/Warburg Syndrome |
| 610253 | 9q34.3 del | EHMT1 | 9q34.3 del syndrome |
| 601362 | 10p14 del | DGSII | DiGeorge syndrome/VCFS, region 2 |
| 146255 | 10p14 del | GATA3 | Hypoparathyroidsim, SNHL, and renal dysplasia |
| 600095 | 10q24.3 dup | DAC | Split hand/split foot syndrome 3 |
| 601224 | 11p11.2 del | EXT2, ALX4 | Potocki-Shaffer syndrome |
| 106210 | 11p13 del | PAX6 | Aniridia type 2 |
| 194072 | 11p13 del | WT1/PAX6 | WAGR |
| 194070 | 11p13 del | WT1 | Wilm's Tumor 1 |
| 130650 | 11p15.5 dup/del | IGF2 | Beckwith-Wiedemann |
| 161015 | 11q13.2 | NDUFV1 | Leukodystrophy and myoclonic epilepsy |
| 147791 | 11q23 del | multiple | Jacobsen syndrome |
| 601803 | 12p tetrasomy | | Pallister-Killian |
| 163950 | 12q24.1 del | PTPN11 | Noonan syndrome |
| 180200 | 13q14 del | RB1 | Retinoblastoma/MR |
| 609637 | 13q32 del | ZIC2 | Holoprosencephaly 5 |
| 105830 | 15q12 | UBE3A | Angelman syndrome |
| 176270 | 15q11.2 | SNRPN | Prader-Willi syndrome |
| | 15q11.2q13 maternal dup | | Autism |
| | 15q21 del | | 15q21 del syndrome |
| 142340 | 15q26.1 del | NR2F2 | Diaphragmatic hernia 1 |
| 601313 | 16p13.3 | PKD1 | Polycystic kidney disease (dominant form) |
| 180849 | 16p13.3 | CREBBP | Rubinstein/Taybi |
| 191100 | 16p13.3 | TSC2 | Tuberous Sclerosis 2 |
| | 17p11.2 | | dup(17)(p11.2p11.2) syndrome |
| 182290 | 17p11.2 del | RAI1 | Smith-Magenis syndrome |
| 118220 | 17p12 dup | PMP22 | Charcot-Marie-Tooth-1A |
| 162500 | 17p12 del | PMP22 | HNPP |
| 247200 | 17p13.3 del | LIS1 | Miller-Dieker syndrome |
| 162200 | 17q11.2 del | NF1 | Neurofibromatosis 1 |
| 114290 | 17q24.3 del | SOX9 | Campomeilc dysplasia |
| 142946 | 18p11.3 del | TGIF | Holoprosencephaly 4 |
| 118450 | 20p12.2 del | JAG1 | Alagille |
| 190685 | 21q22 dup | DSCR1-4 | Down syndrome critical region |
| 236100 | 21q22.3 | TMEM1 | Holoprosencephaly 1 |
| 188400 | 22q11.2 del | TBX1 | DiGeorge syndrome/VCFS, region I |
| 602054 | 22q11.2 dup | TBX1 | dup(22)(q11.2q11.2) syndrome |
| 101000 | 22q12.2 del | NF2 | Neurofibromatosis 2 |
| 250100 | 22q13.31-qter | ARSA | 22q13.3 del syndrome (Angelman-like) |
| 115470 | inv dup(22)(q11.2) | | Cat Eye syndrome |
| 307030 | Xp21 del | GK | Glycerol kinase deficiency |
| 300473 | Xp21.2 del | NROB1 | Adrenal hypoplasia congenita |
| | Xp21.2 dup | NROB1 | Dosage sensitive sex reversal |
| 300300 | Xp22.1 del | BTK | Bruton agammaglobulinemia |
| 308700 | Xp22.3 del | KAL1 | Kallman |
| 309801 | Xp22.3 del | HCCS | Microphthalmia with linear skin defects |
| 308100 | Xp22.3 del | ARSC1 | Steroid sulfatase deficiency |
| 300495 | Xp22.32 del | NLGN4 | Autism, X-linked, region 2 |
| 127300 | Xp22.33/Yp11.32 | SHOX | Leri-Weill dyschondrosteosis |
| 312080 | Xq21 dup/del | PLP | Pelizaeus-Merzbacher disease |
| 300067 | Xq23 del | DCX | X-linked lissencephaly |
| 306955 | Xq26.2 | ZIC3 | X-linked heterotaxy |
| 300123 | Xq27.1 del.dup | SOX3 | X-linked mental retardation |
| 312750 | Xq28 del | MECP2 | Rett |
| 300017 | Xq28 del | FLNA | PNH, frontometaphyseal dysplasia, otopalatodigital |
| 480000 | Yp11.31 del | TDF | Y chromosome |
| 415000 | Yq11 del | AZF a, b, and c | Y chromosome |

TABLE 3
Genomic imbalance (GI) detected in validation samples
and comparison between oligo array results and alternate methods of detection

| | | | BAC array | | | |
|---|---|---|---|---|---|---|
| GI size | | Oligo array CGH | CGH | Cytogenetics (FISH/Karyotype) | MLPA | Comparison |
| 2.4 | Mb | 1p36.3 gain (0-2.4 Mb) | 1p36.3 gain | nuc ish 1p36.3(RP4-740C4x3, RP11- | n/a | Consistent |
| | | | | 547D24x4) | | |
| 500 | kb | 1q32.1-32.2.gain (20.1 Mb-20.6 Mb) | 1q32.3 gain | ish dup(1)(q32.3q32.3) (RP11- | n/a | Consistent |
| | | | | 224F8+) | | |
| 4.3 | Mb | 2q22.3-(145.6 Mb-149.9 Mb) | 2q22.3 loss | ish del(2)(q22.3q22.3)(RP11-89L3−) | n/a | Consistent |
| 4.2 | Mb | 2q37.2 loss (238.2 Mb-242.4 Mb) | 2q37.2 loss | 46, XX, del (2)(q37.2).ish | 2qter loss- | Consistent |
| | | | | del(q37.2q37.2) | subtel | |
| 1.6 | Mb | 2q37.3 loss (241.1 Mb-242.7 Mb) | 2q37.3 loss | 46, XY, ish del(2)(q37.3q37.3)(RP11- | 2qter loss- | Consistent |
| | | | | 367H1−) | subtel | |
| 1.6 | Mb | 2q37.3 loss (241.1 Mb-242.7 Mb) | 2q37.3 loss | ish del(2)(q37.3q37.3)(RP11-367H1−) | n/a | Consistent |
| 54.7 | Mb; | 3q24-q29 gain (144.7 Mb-199.4 Mb); | 3q24-q29 | 46, XY, add(18)(p11.32) | 3q gain- | Consistent |
| 4.8 | Mb | | gain; | | | |
| | | 18p11.32 loss (0.43 Mb-5.3 Mb) | 18p11.32 | | subtel; 18p | |
| | | | loss | | loss-subtel | |
| 3.6 | Mb | 4p16.3 loss (0-3.6 Mb) | 4p16.3 loss | 46, XY, del(4)(p16.3).ish | 4pter deletion | Consistent |
| | | | | del(p16.3p16.3) | | |
| 200 | kb | 4q22.3 gain (98.9 Mb-99.1 Mb) | 4q22.3 gain | ish dup(4)(q22.3q22.3)(RP11- | n/a | Consistent |
| | | | | 369I16+) | | |
| 700 | kb | 4q35.2 (188.8 Mb-189.5 Mb) | 4q35.2 loss | ish del(4)(q35.2q35.2)(RP11-565A3−) | n/a | Consistent |
| 1.3 | Mb; | 5p15.33 gain (0-1.3 Mb); 7q36.3 | 5p15.3 gain; | ish | 5p15.3 gain- | Consistent |
| 3.7 | Mb | loss (153 Mb-156.7 Mb) | 7q36 loss | der(7)t(5; 7)(p15.3; q36)(5ptel+, SHH−) | subtel; 7q36 | |
| | | | | | loss-subtel | |
| 1.9 | Mb | 6p24.1 gain (12.7 Mb-14.6 Mb) | 6q24.1 gain | ish dup(6)(q24.1q24.1)(RP3- | n/a | Consistent |
| | | | | 468K18+) | | |
| 7.3 | Mb | 6q24.1-24.3 loss (140.7 Mb-148 Mb) | 6q24.1 loss | ish del(6)(q24.1q24.1)(RP3-468K18−) | n/a | Consistent |
| 4.1 | Mb | 6q26 loss (166 Mb-170.1 Mb) | 6q26 loss | 46, XX, del(6)(q26) | 6qter loss- | Consistent |
| | | | | | subtel | |
| 12 | Mb | 7q11.22 loss (61.9 Mb-73.9 Mb) | n/a | n/a | 7q11.23 loss- | Consistent |
| | | | | | WBS | |
| 1.4 | Mb | 7q11.22 loss (72.1 Mb-73.5 Mb) | n/a | n/a | 7q11.23 loss- | Consistent |
| | | | | | WBS | |
| Aneuploidy | | 8 gain, 21 gain, 13qter gain | n/a | Trisomy 8, trisomy 21, trisomy 13q | n/a | Consistent |
| 7.1 | Mb; | 8p23.2-8pter loss (0.181-7.3 Mb); | n/a | n/a | 8p loss- | Consistent |
| 4 | Mb | 8q24.3-8qter gain (142 Mb-146 Mb) | | | subtel; 8q | |
| | | | | | gain-subtel | |
| 17.3 | Mb | 8q21.11-21.3 loss (75.3 Mb-92.6 Mb) | 8q21.1 loss | ish del(8)(q21.1q21.1)(RP11-90B7−) | n/a | Consistent |
| 320 | kb | 9p24.3 gain (0.09 Mb-0.41 Mb) | 9p24.3 gain | ish dup(9)(pter)(GS-43N6+) | n/a | Consistent |
| 100 | kb | 9q34.3 loss (13.7 Mb-13.8 Mb) | n/a | n/a | 9q loss-subtel | Consistent |
| 500 | kb | 10q26.3 loss (131.6 Mb-132.1 Mb) | 10q26.3 loss | ish del(10)(q26.3q26.3)(RP11-435P9−) | n/a | Consistent |
| 300 | kb | 11p13 loss (3.2 Mb-3.5 Mb) | n/a | n/a | 11p13 loss | Consistent |
| 2.3 | Mb | 15q11-12 gain (20.3 Mb-22.6 Mb) | n/a | n/a | 15q11-13 | Consistent |
| | | | | | gain-Autism | |
| 11 | Mb | 15q11-13 gain (19.1 Mb-30.1 Mb) | n/a | n/a | 15q11-13 | Consistent |
| | | | | | gain | |
| | | | | | PWS/AS | |
| 6.6 | Mb | 15q11-13 gain (20.4 Mb-27 Mb) | n/a | n/a | 15q11-13 | Consistent |
| | | | | | gain- | |
| | | | | | PWS/AS | |
| 300 | kb | 15q11-13 loss (20.3 Mb-20.6 Mb) | n/a | n/a | 15q11-13 | Consistent |
| | | | | | loss-PWS/AS | |
| 5.7 | Mb | 15q11-13 loss (20.4 Mb-26.1 Mb) | n/a | n/a | 15q11-13 | Consistent |
| | | | | | loss-PWS/AS | |
| 800 | kb | 16p11.2 loss (34 Mb-34.8 Mb) | 16p11.2 loss | ish del(16)(p11.2p11.2)(RP11- | n/a | Consistent |
| | | | | 244B22−) | | |
| 200 | kb | 16p13.12 loss (13.9 MB-14.1 Mb) | n/a | n/a | 16p loss- | Consistent |
| | | | | | ERCC4 gene | |
| 300 | kb | 16q24.2 loss (87.8 Mb-88.1 Mb) | 16q24.3 loss | ish del(16)(q24.3q24.3)(RP11- | n/a | Consistent |
| | | | | 104N10dim) | | |
| 2.3 | Mb | 16q24.3 gain (86 Mb-88.3 Mb) | 16q24.3 gain | ish der(9)t(9; 16)(q34.3; q24.3)(RP11- | 16qter gain- | Consistent |
| | | | | 21B21+, RP11-104N10+, RP11- | subtel | |
| | | | | 566K11+) | | |
| 3.6 | Mb | 17p11.2 loss (16.5 Mb-20.1 Mb) | 17p11.2 loss | ish del(17)(p11.2p11.2)(SMS−) | n/a | Consistent |
| 2.7 | Mb | 17p13.2 loss (2.2 Mb-4.9 Mb) | 17p13.2 loss | ish del(17)(p13.2p13.2)(LIS1−) | n/a | Consistent |
| 298 | kb | 17p13.3 gain (0.084 Mb-0.382 Mb) | n/a | n/a | 17p gain- | Consistent |
| | | | | | subtel | |
| 1.5 | Mb | 18q21.1 loss (44.5 Mb-46 Mb) | n/a | n/a | 18q loss | Consistent |
| 2.5 | Mb | 19p13.12 loss (13.8 Mb-16.3 Mb) | 19p13.1 loss | ish del(19)(p13.1p13.1)(RP11- | n/a | Consistent |
| | | | | 56K21−) | | |
| 11 | Mb | 20p12.3 loss (64.9 Mb-75.9 Mb) | 20p12.3 loss | ish del(20)(p12.3p12.3)(RP11- | n/a | Consistent |
| | | | | 116E13−) | | |
| 44 | kb | 20pter loss (0-0.044 Mb) | 20p13 loss | ish del(20)(p13p13)(RP11-530N10−) | n/a | Consistent |
| 2.9 | Mb | 22q11.21 gain (17.2 Mb-20.1 Mb) | n/a | n/a | 22q11.2 gain- | Consistent |
| | | | | | VCFS/DGCR | |
| 2.9 | Mb | 22q11.21 gain (17.2 Mb-20.1 Mb) | n/a | n/a | 22q11.2 gain- | Consistent |
| | | | | | VCFS/DGCR | |
| 2.4 | Mb | 22q11.21 loss (16.7 Mb-19.1 Mb) | 22q11.2 loss | ish del(22)(q11.2q11.2)(RP11- | n/a | Consistent |
| | | | | 316L10−) | | |
| 2.5 | Mb | 22q11.21 loss (17.2 MB-19.7 Mb) | n/a | n/a | 22q11.2 loss- | Consistent |
| | | | | | VCFS/DGCR | |
| 2.9 | Mb | 22q11.21 loss (17.2 Mb-20.1 Mb) | n/a | n/a | 22q11.2 loss- | Consistent |
| | | | | | VCFS/DGCR | |
| 2.9 | Mb | 22q11.21 loss (17.2 Mb-20.1 Mb) | n/a | n/a | 22q11.2 loss- | Consistent |
| | | | | | VCFS/DGCR | |
| 2.9 | Mb | 22q11.21 loss (17.2 Mb-20.1 Mb) | n/a | n/a | 22q11.2 loss- | Consistent |
| | | | | | VCFS/DGCR | |
| 2.9 | Mb | 22q11.21 loss (17.2 Mb-20.1 Mb) | n/a | n/a | 22q11.2 loss- | Consistent |
| | | | | | VCFS/DGCR | |
| 200 | kb | 22q13.33 gain (49.2 Mb-49.4 Mb) | n/a | n/a | 22q13.33 | Consistent |
| | | | | | gain-ARSA | |
| Aneuploidy | | X gain | n/a | 47, XXY | n/a | Consistent |
| 1.5 | Mb | Xp22.31 loss (6.5 Mb-8 Mb) | Xp22.31 loss | ish del(X)(p22.3p22.3)(STS−) | n/a | Consistent |
| 600 | kb | Xp22.32 loss (5.2 Mb-5.8 Mb) | Xp22.32 loss | ish del(X)(p22.3p22.3)(RP11- | n/a | Consistent |
| | | | | 323G19−) | | |

Size for genomic imbalance indicates minimum.
Abbreviations:
ARSA = Arylsulfatase A gene locus associated with atypical Angelman syndrome;
AS = Angelman syndrome;
DGCR = Di George syndrome critical region;
PWS = Prader-willi syndrome;
WBS = Williams-Beuren syndrome

TABLE 4
Detection of 16p11.2 Copy-Number Variants, According to Sample.*

| | Case | Control | | | Case | | | Control | | P |
|---|---|---|---|---|---|---|---|---|---|---|
| Sample | Subjects | Subjects | Experiment | Analysis | Deletion | Duplication | number | Deletion | Duplication | Value† |
| AGRE | 751 Families, | 1420 AGRE | Affymetrix | COPPER | 5 | 7 | | 3 | 2 | 1.1 × 10⁻⁴ |
| | with 1441 | parents and | 5.0 for | and | | | | | | |
| | case | 2814 samples | AGRE | Burdseye | | | | | | |
| | subjects‡ | with bipolar | families, | for AGRE | | | | | | |
| | | disorder or | Affymetrix | families, | | | | | | |
| | | NIMH control | 500K for | COPPER | | | | | | |
| | | | controls | for | | | | | | |
| | | | | controls | | | | | | |
| Children's | 512 Children | 434 Children | Agilent | ADM-2 | 5 [symbol] | 4 | | 0 | 0 | 7.1 × 10⁻³ |
| Hospital | | | comparative | | | | | | | |
| Boston∫∫ | | | genomic | | | | | | | |
| | | | hybridization | | | | | | | |
| deCode | 299 Subjects | 18,834 Subjects | Illumina | HMM | 3 | 0 | | 2 | 5 | 4.2 × 10⁻⁴ |
| | with autism | not screened | Human- | | | | | | | |
| | spectrum | for a psychiatric | Hap300 | | | | | | | |
| | disorder\|\| | or language | BeadChip | | | | | | | |
| | | disorder | | | | | | | | |

*ADM denotes aberration detection method, AGRE Autism Genetic Resource Exchange, COPPER copy-number polymorphism evaluation routine, HMM hidden Markov model, and NIMH National Institute of Mental Health.
†P Values for deletions plus duplications are for the comparison between case subjects and control subjects, as calculate by Fisher's exact test.
‡Subjects were assessed according to the Autism Diagnostic Interview - Revised (for details, see the Supplementary Appendix).
∫∫ Case subjects had received the diagnosis of developmental delay, mental retardation, or autism spectrum disorder after clinical evaluation. Control subjects had been referred for congenital anomalies not including developmental delay, mental retardation, or autism spectrum disorder. [symbol]
The number includes a monozygotic twin pair.
||The diagnosis of autism spectrum disorder was made according to the definition in the International Classification of Diseases, 10^{th} revision.

TABLE 5
Duplication of Chromosome 15q11-13 in the AGRE Sample.*

| Chromosome and Region | |
|---|---|
| Chromosome 15 | Inheritance and Transmission |
| 21.2-26.3 (BP2-BP3) | 2 De novo copy-number variants |
| 18.8-26.4 (BP1-BP3) | Inherited copy-number variant, 2 transmitted |
| | and 0 not transmitted; 1 unknown |
| 23.3-24.7 | De novo copy-number variant |

*Duplications of the region associated with the Prader-Willi and Angelman syndromes were detected by applying novel algorithms to Affymetrix 5.0 genotype data. For inherited events, listed are the number of transmitted copy-number variants and the number of copy-number variants that were not transmitted to affected offspring for whom data were available. AGRE denotes Autism Genetic Resource Exchange.

TABLE 6
Phenotypic Date in AGRE families and Iceland probands with copy number variants at 16p1 1.2. Family Structure and ADI-R and ADOS
subscores, as well as performance measures are given for AGRE families and Iceland probands with copy number variants at 16p1 1.2

| | | | | | | | | | | ADI-R | | |
|---|---|---|---|---|---|---|---|---|---|---|---|---|
| | | | | | | | | | ADI-R | Commu- | | |
| | | | | | | | | | Commu- | nication - | | |
| | | | | | Scored | | Age at | ADI-R | nication - | Non- | ADI-R | ADI-R |
| | Father | Mother | | Deletion/ | Affected | ADOS | ADI-R | Social | Verbal | Verbal | Behavior | Development |
| ID | ID | ID | Gender | Duplication | Status | Diagnosis | Exam | Total | Total | Total | Total | Total |
| AU002901 | 0 | 0 | Female | Duplication | | | | | | | | |
| AU002902 | 0 | 0 | Male | | | | | | | | | |
| AU002903 | 2 | 1 | Male | Duplication | Autism | Spectrum | 13.07 | 28 | | | | |
| AU002904 | 2 | 1 | Female | Duplication | | | | | 16 | | 6 | 4 |
| AU002905 | 2 | 1 | Female | Duplication | Autism | Autism | 9.84 | 27 | 17 | | 8 | 3 |
| AU011001 | 9 | 8 | Female | | | | | | | | | |
| AU011002 | 0 | 0 | Male | | | | | | | | | |
| AU011003 | 2 | 1 | Male | | | | | | | | | |
| AU011004 | 2 | 1 | Male | Duplication | Autism | Autism | 7.95 | 26 | 15 | | 7 | 5 |
| AU011005 | 2 | 1 | Male | | Autism | Autism | 5.76 | 27 | 17 | | 4 | 5 |
| AU0154201 | 0 | 0 | Male | | | | | | | | | |
| AU0154202 | 0 | 0 | Female | | | | | | | | | |
| AU0154301 | 201 | 202 | Female | | | | | | | | | |
| AU0154302 | 201 | 202 | Male | Deletion | Autism | Autism | 14.73 | 28 | | 12 | 4 | 5 |
| AU0154303 | 201 | 202 | Female | Deletion | Autism | Autism | 12.85 | 30 | | 14 | 4 | 5 |
| AU029801 | 0 | 0 | Female | | | | | | | | | |
| AU029802 | 0 | 0 | Male | | | | | | | | | |
| AU029803 | 2 | 1 | Male | Deletion | Autism | | 4.79 | 16 | 14 | | 3 | 3 |
| AU029804 | 2 | 1 | Male | | Autism | | 2.95 | 25 | 18 | | 5 | 3 |
| AU032701 | 0 | 0 | Female | | | | | | | | | |
| AU032702 | 0 | 0 | Male | Duplication | | | | | | | | |
| AU032703 | 2 | 1 | Female | | | | | | | | | |
| AU032704 | 2 | 1 | Male | Duplication | Autism | Autism | 9.99 | 28 | 18 | | 4 | 5 |
| AU032705 | 2 | 1 | Male | Duplication | Autism | Autism | 8.36 | 28 | 23 | | 8 | 5 |
| AU032706 | 2 | 1 | Male | Duplication | Autism | Autism | 6.86 | 27 | 18 | | 4 | 5 |
| AU032707 | 2 | 1 | Male | Duplication | Autism | Autism | 10.55 | 26 | 24 | | 8 | 5 |
| AU041901 | 0 | 0 | Female | | | | | | | | | |
| AU041902 | 0 | 0 | Male | | | | | | | | | |
| AU041903 | 2 | 1 | Female | | | | | | | | | |
| AU041904 | 2 | 1 | Male | | Autism | Autism | 7.56 | 28 | | 14 | 6 | 5 |
| AU041905 | 2 | 1 | Male | Deletion | Autism | Autism | 5.92 | 15 | | | 6 | 5 |
| AU0938201 | 0 | 0 | Male | | | | | | | | | |
| AU0938202 | 0 | 0 | Female | | | | | | | | | |
| AU0938301 | 201 | 202 | Male | Deletion | Autism | Autism | 9.32 | 18 | 12 | | 6 | 5 |
| AU0938302 | 201 | 202 | Male | | Autism | Autism | 7.43 | 16 | 13 | | 4 | 5 |

Iceland Samples

| | | | | | | | | | | | |
|---|---|---|---|---|---|---|---|---|---|---|---|
| Aut1 | Adoptee | Adoptee | Female | Deletion | Autism | Autism | 18.33 | 10 | 10 | 4 | 1 |
| | 1a | 1b | | | | | | | | | |
| Aut2 | ADHD | 2b | Male | Deletion | Autism | Autism | 10.58 | 14 | 9 | 7 | 3 |
| | 2a | | | | | | | | | | |
| Aut3 | 3a | 3b | Female | Deletion | Autism | N/A | N/A | N/A | N/A | N/A | N/A |

| | | | | | | | | | Peabody | | | | |
|---|---|---|---|---|---|---|---|---|---|---|---|---|---|
| | | | | | | | | Age at | Picture | | | | |
| | | | | | ADOS | | | Peabody | Vocab- | | | | |
| | | | ADOS | | Commu- | | | Picture | ulary | | Raven | | |
| | Age at | | Commu- | ADOS | nication + | ADOS | ADOS | Vocab- | Test | | Non- | Age at | Vine- |
| | ADOS | ADOS | nication | Social | Social | Play | Behavior | ulary | Estimated | Age at | verbal | Vine- | land |
| ID | Exam | Module | Total | Total | Total | Total | Total | Test | Age | Raven | IQ | land | Score |
| AU002901 | 15.46 | 4 | 3 | 4 | 7 | 1 | 2 | 15 | >22 yrs | 15 | 94 | 16.2 | 6 yrs |
| | | | | | | | | | | | | | 8 mos |
| AU002902 | 11.94 | 3 | 6 | 12 | 18 | 2 | 0 | 11 | 10 yrs | 11 | 90 | 12.68 | 9 yrs |
| | | | | | | | | | 9 mos | | | | 5 mos |
| AU002903 | | | | | | | | | | | | | |
| AU002904 | | | | | | | | | | | | | |
| AU002905 | | | | | | | | | | | | | |
| AU011001 | | | | | | | | | | | | | |
| AU011002 | | | | | | | | | | | | | |
| AU011003 | | | | | | | | | | | | | |
| AU011004 | 11.09 | 3 | 3 | 8 | 11 | 0 | 3 | | | 11 | 110 | | |
| AU011005 | 8.9 | 3 | 6 | 12 | 18 | 2 | 2 | | | 8 | 136 | | |
| AU0154201 | | | | | | | | | | | | | |
| AU0154202 | | | | | | | | | | | | | |
| AU0154301 | | | | | | | | | | | | | |
| AU0154302 | 14.73 | 1 | 4 | 9 | 13 | 2 | 4 | 14 | | 14 | 70 | | |
| AU0154303 | 12.92 | 1 | 5 | 12 | 17 | 4 | 0 | 12 | | 12 | | | |
| AU029801 | | | | | | | | | | | | | |
| AU029802 | | | | | | | | | | | | | |
| AU029803 | | | | | | | | | | | | | |
| AU029804 | | | | | | | | | | | | | |
| AU032701 | | | | | | | | | | | | | |
| AU032702 | | | | | | | | | | | | | |
| AU032703 | | | | | | | | | | | | | |
| AU032704 | 14.82 | 3 | 4 | 7 | 11 | 0 | 1 | 14 | 14 yrs | 14 | 75 | | |
| | | | | | | | | | 9 mos | | | | |
| AU032705 | 13.19 | 2 | 5 | 8 | 13 | 1 | 5 | 13 | 7 yrs | 13 | 50 | | |
| | | | | | | | | | 2 mos | | | | |
| AU032706 | 11.68 | 3 | 3 | 7 | 10 | 0 | 0 | 11 | 14 yrs | 11 | 107 | | |
| | | | | | | | | | 9 mos | | | | |
| AU032707 | 10.55 | 3 | 6 | 13 | 19 | 1 | 1 | 10 | 9 yrs | 10 | 107 | | |
| | | | | | | | | | 3 mos | | | | |
| AU041901 | | | | | | | | | | | | | |
| AU041902 | | | | | | | | | | | | | |
| AU041903 | | | | | | | | | | | | | |
| AU041904 | 9.65 | 1 | 6 | 8 | 14 | 1 | 5 | 9 | 4 yrs | 9 | 78 | | |
| | | | | | | | | | 1 mo | | | | |
| AU041905 | 7.96 | 3 | 5 | 10 | 15 | 1 | 4 | 7 | 5 yrs | 7 | 108 | | |
| | | | | | | | | | 6 mos | | | | |
| AU0938201 | | | | | | | | | | | | | |
| AU0938202 | | | | | | | | | | | | | |
| AU0938301 | 9.32 | 3 | 3 | 7 | 10 | 1 | 3 | 9 | 6 yrs | 9 | 80 | | |
| | | | | | | | | | 5 mos | | | | |
| AU0938302 | 7.43 | 3 | 5 | 9 | 14 | 1 | 3 | 7 | 4 yrs | 7 | 70 | | |
| | | | | | | | | | 10 mos | | | | |

Iceland Samples

| | | | | | | | | WISC- | WISC- | WISC- | WISC- |
|---|---|---|---|---|---|---|---|---|---|---|---|
| | | | | | | | | 111 | 111 | 111 | 111 |
| | | | | | | | | Age | VIQ | PIQ | FS |
| Aut1 | 18.42 | 4 | 3 | 8 | 11 | 0 | 0 | 17.75 | 65 | 61 | 61 |
| Aut2 | 10.58 | 3 | 7 | 11 | 18 | 3 | 2 | 7.1 | 75 | 75 | 73 |
| Aut3 | N/A | N/A | N/A | N/A | N/A | N/A | N/A | N/A | N/A | N/A | N/A |

TABLE 7
Previously reported CNVs in autism.

| Event reported | | | Events observed | | | | |
|---|---|---|---|---|---|---|---|
| Chr | Mb | event | Chr | Mb | event | Inheritance, transmission (T:U) | Reference |
| 1 | 143.8-144.9 | dup | 1 | 144.8-145.1 | del | inherited, 1:0 | 9 |
| | | | | 143.5-145.0 | del | de novo** | |
| | | | | 143.6-145 | dup | unknown, not shared by affected sib | |
| | | | | 143.5-145 | dup | inherited 1:2 | |
| 2 | 50.4-50.8 | del | 2 | ~50.4 | del | inherited, 1:1 (one add'l possible) | 9 |
| | | | | ~51 (varied) | | inherited, 11:9 | |
| 2 | 162.2-162.3 | del | none | | | NA | 10 |
| 2 | 236.4-249.4 | del | none | | | NA | 10 |
| | 238.2-242.7 | del | | | | | |
| 3 | 60.7-60.8 | del | 3 | 60.9-61.1 | del | parent, 0:4 | 10 |
| | 61.1-61.4 | dup | | 60.8-61.2 | dup | parent, 0:2 | |
| | | | | 60.8-60.9 | dup | parent, 0:1 | |
| 6 | 14.0-15.3 | del | none | | | NA | 10 |
| 7 | 15.2-15.3* | del | no additional events | | | NA | 10 |
| 10 | 50.6-61.5 | dup | none | | | NA | 10 |
| 13 | 44.2-46.1 | del | none | | | NA | 10 |
| 15 | 18.5-30.7 | dup | 15 | 21.2-26.3 | dup | 2 de novo | 10 |
| | | | | 18.8-26.4 | dup | inherited, 2:0; 1 unknown | |
| | | | | 23.3-24.7 | dup | de novo | |
| 16 | 5.99-6.20 | del | 16 | 6.03-6.06 | del | parent, 0:2 | 10 |
| | | | | 6.06-6.08 | del | inherited, 2:0 | |
| | | | | 6.06-6.19 | dup | inherited, 2:0 | |
| 16 | 29.6-31.1 | del | 16 | 29.5-30.0 | del | de novo (5 cases in 4 families) | 10 |
| | | | | 29.5-30.0 | dup | inherited, 7:0, 1 de novo | |
| | | | | 29.6-29.7 | dup | inherited, 1:1 | |
| 17 | 14.3-15.2 | del | 17 | 14.0-15.4 | del | inherited, 2:0 | 9 |
| | 14.3-15.2 | dup* | | | | | |
| 20 | 0.08-0.37 | del | 20 | 0.20-0.22 | del | parent, 0:1 | 10 |
| 20 | 2.8-3.9 | del | 20 | 3.72-3.74 | del | inherited, 1:1 | 10 |
| | | | | 2.9-3.0 | dup | inherited, 1:0 | |
| 22 | 17.5-19.8 | del | 22 | 19.2-19.8 | del | Unknown | 9 |
| | 17.5-20.3 | dup* | | 17.2-19.8 | dup | parents, 0:3 | |
| | | | | 16.1-16.3 | dup | inherited, 2:1 | |
| | | | | 17.3-18.7 | dup | unknown | |
| | | | | 19.0-19.8 | dup | inherited, 1:1 | |
| 22 | 45.1-49.5 | del | 22 | 45.60-45.65 | del | parent, 0:2 | 10 |
| | | | | 48.17-48.23 | del | inherited, 4:4 | |
| | | | | 48.14-48.18 | del | inherited, 2:0 | |
| | | | | 47.7-48.3 | dup | inherited 3:1 | |

Events featured in the main tables or text of recent studies evaluating copy number in autism.
For each reported event, we include events observed in our data with substantial overlap, and for inherited events, the number transmitted: not transmitted for affected offspring with data.
Our sample has some overlap with previously reported samples,
*indicates a reported event in an overlapping sample which we also detect.
**event not featured in the main text or tables of the paper, but listed in the table in an overlapping sample.

TABLE 8
Clinical information for Children's Hospital deletion cases (Pt#) and Iceland deletion cases
(Aut#). Clinical descriptive information is given for the 5 subjects in the Children's Hospital
Boston sample with deletions at 16p11.2, and the two subjects in the Iceland sample with deletions at
16p11.2 and clinical data available. The third Iceland subject has a history of seizures, but no other
information available.
Physical characteristics of individuals with del(16)(p11.2)

| | Pt 1 | Pt 2 | Pt 3 | Pt 4 | Pt 5 | Aut2 | Aut1 |
|---|---|---|---|---|---|---|---|
| Gender | Male | Male | Male | Male | Male | Male | Female |
| History | | | | | | | |
| Speech delay | + | + | + | + | + | + | + |
| Motor delay | + | + | + | + | + | − | + |
| Poor eye contact | + | NA | NA | + | + | + | + |
| Tactile aversion | + | NA | NA | | | − | − |
| Self stim behavior | + | NA | NA | | | + | − |
| Age at walking | 18 m | 16 m | 17 m | 16 m | 16 m | 13 m | |
| Regression | − | − | − | − | − | − | − |
| Other | | | | | | ADHD, | ADHD |
| | | | | | | seizure | |
| Physical Exam | | | | | | | |
| Age at examination | 6 y 6 m | 2 y 9 m | 17 m | 9 y 2 m | 9 y 2 m | 10 y 6 m | 5 y 2 m |
| Height (% ile) | 108.1 cm | NA | 74.2 cm | 143.3 cm | 150 cm (>97^{th}) | 152 cm | 106 cm |
| | (<3^{rd}) | | (<3^{rd}) | (90^{th}) | | (95^{th}) | (25^{th)} |
| Weight (% ile) | 19 kg (10^{th}) | NA | 9 kg (<3^{rd}) | 65.4 kg | 71.9 kg (>97^{th}) | 69 kg | 18 kg |
| | | | | (>97^{th}) | | (>97^{th}) | (50^{th)} |
| OFC (% ile) | 51 cm (50^{th}) | 52 cm (90^{th}) | 48.5 cm | 54.5 cm (90^{th}) | 56 cm (>97^{th}) | 54 cm | 52.5 cm |
| | | | (75^{th}) | | | (60^{th}) | (90^{th}) |
| Facial | − | − | − | − | − | | |
| dysmorphism | | | | | | | |
| 2-3 toe syndactyly | + | − | − | − | − | | |

TABLE 9
Clinical information for Children's Hospital duplication
cases. Clinical descriptive information is given for the 4 subjects in the Children's
Hospital Boston sample with duplication at 16p11.2.
Physical characteristics of individuals with dup(16)(p11.2)

| | Pt 1 | Pt 2 | Pt 3 | Pt 4 |
|---|---|---|---|---|
| History | | | | |
| Gender | Male | Female | Male | Female |
| Speech delay | unknown | + (mild) | + | + |
| Motor delay | + | + | − | |
| Poor eye contact | NA | − | − | |
| Tactile aversion | NA | − | − | |
| Self stim behaviors | NA | − | − | |
| Age at walking | Not crawling or | NA | 16 m | 14 m |
| | walking yet | | | |
| Regression | − | − | − | − |
| Other | Agenesis of | | | Seizures |
| | corpus callosum | | | beginning age |
| | | | | 6 m; MR |
| Physical Exam | | | | |
| Age at examination | 14 m | 3 y3 m | 2 y6 m | 9 y9 m |
| Height (% ile) | NA | 97.2 cm (50-75^{th}) | 92.4 cm (50^{th}) | |
| Weight (% ile) | 11 kg (50^{th}) | 14.7 kg | 15.2 kg (90^{th}) | 33.5 kg (50^{th}) |
| | | (50-75^{th}) | | |
| OFC (% ile) | 80th | 46.5 cm | 51.25 cm (95^{th}) | 51 cm (25^{th}) |
| | | (<3^{rd}) | | |
| Facial | − | − | − | − |
| dysmorphism | | | | |
| Hypotonia | + (mild) | − | − | − |
| Other | | Mild spasticity; | | |
| | | Fifth finger | | |
| | | clinodactyly | | |
| Laboratory testing | | | | |
| Karyotype | NA | NA | 46, XY, dup(16) | NA |
| | | | (q11.2q12.1) | |
| Fragile X | NA | NA | NA | NA |

NA = not assessed

TABLE 10
Iceland phenotype information. Clinical diagnosis by ICD-10
category and transmission information is listed for the Icelandic
autism samples with deletions at 16p11.2.

| Alias ICE | ICD-10 | Sex | Age | Transmission |
|---|---|---|---|---|
| | Autism, mild | | | |
| Aut1 | MR | F | 22 | No info on parents |
| | Atypical | | | |
| Aut2 | Autism | M | 12 | Transmitted from father |
| Aut 3 | Asperger's | F | 37 | de novo |
| | unspecified | | | |
| | MR, epilepsy | | | |

TABLE 11
15q13.2q13.3 microduplications and microdeletions in individuals with autism.

| | Patient 6 | Patient 3 | Patient 8 | Patient 9 | Patient 10 |
|---|---|---|---|---|---|
| Genetics | | | | | |
| Cohort | CHB | CHB | AGRE | AGRE | AGRE |
| Referring | Autism | Autistic Spectrum | Autism | Autism | Autism |
| Diagnosis | | | | | |
| size | 1.98 Mb | 1.70 Mb Deletion | 1.93 Mb Duplication | 0.50 Mb Duplication | 0.50 Mb Duplication |
| | Duplication | | | | |
| Coordinates | 28,719,136-30,701,432 | 28,709,202-30,405,675 | 28,719,136-30,648,918 | 28,902,339-29,404,603 | 28,902,339-29,404,603 |
| (hg18) | | | | | |
| Origin | de novo | Unknown (adopted) | de novo | Maternal | Maternal |
| LCR involved | BP4-BP5 | BP4-BP5 | BP4-BP5 | Internal to BP4-BP5 | Internal to BP4-BP5 |
| Age and Gender | 20 y Male | 10 y 9 m Male | 8 y Male | Male | Male |
| Cognitive/ | | | | | |
| Behavioral | | | | | |
| Development | | | | | |
| Developmental | Yes | Yes | Yes | N/A | N/A |
| Delay | | | | | |
| Mental | Yes | No | Not tested | N/A | N/A |
| Retardation | | | | | |
| ASD | Yes | No | Yes, ADOS, ADI-R | Yes, ADI-R | Yes, ADI-R |
| Cognitive Testing | FSIQ below 50 | FSIQ = 86%; memory | N/A | N/A | N/A |
| | | 77; Verbal 93; | | | |
| | | WISC-IV | | | |
| Receptive | Severely impaired | Mildly impaired | Severely Impaired | N/A | N/A |
| Language | (follows simple | | | | |
| | commands | | | | |
| Expressive | Severely impaired | Mildly impaired | Severely Impaired | N/A | N/A |
| Language | (nonverbal) | | | | |
| Repetitive | Yes | No | N/A | N/A | N/A |
| behavior | | | | | |
| Poor eye contact | Yes; variable | Yes | N/A | N/A | N/A |
| Social | Impaired | Impaired | N/A | N/A | N/A |
| interactions | | | | | |
| Self-stimulatory | Yes | No | N/A | N/A | N/A |
| behaviors | | | | | |
| Self-injurious | Yes | Unkown | N/A | N/A | N/A |
| behaviors | | | | | |
| Behavioral issues | Yes | Yes | N/A | N/A | N/A |
| Age at Walking | 12 m | 18 m | N/A | N/A | N/A |
| History of | None | None | N/A | N/A | N/A |
| Seizures | | | | | |
| EEG | Normal | Normal | N/A | N/A | N/A |
| MRI | Normal | Not done | N/A | N/A | N/A |

TABLE 12

Multiplex ligation-dependent probe amplification (MLPA) probes for identifying
microduplications and microdeletions at chromosome 15q13.2q13.3 BP4-BP5
and 16p11.2 loci.

| | | | | |
|---|---|---|---|---|
| | Ampli- | | | |
| Probe | con | | | Probe |
| name | size | Probe sequence (first half) | Probe sequence (second half) | type |

| | | | | |
|---|---|---|---|---|
| RYR3 | 92 | CCAGATCTCTGCGTCTGCAATTTTGTG | CTGGAACAGTCCCTATCTGTCAG (SEQ. ID No 2) | control |
| | | (SEQ. ID No 1) | | |
| CLN5-3 | 98 | CCAACTTGGCAACTGTACATTTCCC (SEQ. ID No 3) | CATCTCCGACCTGAAATGGATGCCCCTTTCT | control |
| | | | (SEQ. ID No 4) | |
| CHRNA7 | 100 | CAATGACTCGCAACCACTCACCGTCTACTTCTC | CCTGAGCCTCCTGCAGATCATGGAC (SEQ. ID No 6) | target |
| Ex2 | | (SEQ. ID No 5) | | |
| TJP1 | 104 | GACCAGCGGTCAGAGCCTTCTGATCATTCCAGG | CACTCGCCGCAGCAGCCAAGCAATGGCAG | control |
| | | (SEQ. ID No 7) | (SEQ. ID No 8) | |
| OTUD7A | 109 | CACAGCCAATCTGCCACATGTGTTCAATGAAGGGCGG | GGTCCCAAGCAGCCAGAGCGAGAGCCACAG | target |
| | | (SEQ. ID No 9) | (SEQ. ID No 10) | |
| GREM1 | 114 | GGTCACACTCAACTGCCCTGAACTACAGCCAC | CTACCAAGAAGAAGAGAGTCACACGTGTGAAGCAGTGTCG | control |
| | | (SEQ. ID No 11) | (SEQ. ID No 12) | |
| Wnt5a6 | 117 | CTGATTCCTCCGTGTTGTGATGTGATGCTGGCCAC | GTTTCCAAACGGCAGCTCCACTGGGTCCCCTTTGGTTGTA | Control |
| | | (SEQ. ID No 13) | (SEQ. ID No 14) | |
| TRPM1 | 120 | GTGTTATCAGCCACGTAGGGGATGCCTTGAAAGACCACTCC | CAAGTCCAGAGGCCGGGTTTGTGCTATAGGAATTG | target |
| | | TC | (SEQ. ID No 16) | |
| | | (SEQ. ID No 15) | | |
| MTMR15 | 126 | GGAGGTCAGGGACAGCTTTCAACAGTCCTGTTGGTCAA | CCTCGGCCGAATGGAGTTTCCTAGTTACACCATCAATCGGA | target |
| | | (SEQ. ID No 17) | AAACC (SEQ. ID No 18) | |
| CACAN2 | 129 | GGTGTCTGAAGACTACACACAGGTGAGTGAAAATTTTCTAC | AAGTAAGGATCTCAGAATGTGCTTGGGTCAGGGGGAACA | Control |
| D3Ex30 | | CAGCTCC (SEQ. ID No 19) | (SEQ. ID No 20) | |
| CACAN2 | 134 | GTCATGGAATACCTTCACGTGCTTAGCCGGCCCAAAGTCAT | AGGAGCATGATGTGGTGTGGACCGAAGCTTACATTGACAGC | control |
| D3Ex13 | | CGACC (SEQ. ID No 21) | ACTGT (SEQ. ID No 22) | |
| SEPT1 | 92 | GCGACGGATGCTGGTGCAGACACA (SEQ. ID No 23) | CCTGCAGGACCTGAAAGAGGTGACGC (SEQ. ID No | control |
| | | | 24) | |
| SPN | 99 | GCTTCTCCTTCTCCTTGGGGTGCTGGTG (SEQ. ID No | GTAAGCCCAGACGCTCTGGGGAGCACAAC | target |
| | | 25) | (SEQ. ID No 26) | |
| MAZ | 104 | GACACGAGGAGAAAGTGCCATGTCACGTGT | GTGGCAAGATGCTGAGCTCGGCTTATATTTCG | target |
| | | (SEQ. ID No 27) | (SEQ. ID No 28) | |
| TAOK | 107 | GCTGGACAACCTGCAGTACCGCAAGATGAAG (SEQ. ID | AAGATCCTGTTCCAAGAGGCACCCAACGGCCCTGG | target |
| | | No 29) | (SEQ. ID No 30) | |
| TBX6 | 114 | GTCAGTCACTGGCCTGGACCCCGAGGCCCGCTACTTGTTT | CTTCTGGATGTGATTCCGGTGGATGGGGCTCG | target |
| | | (SEQ. ID No 31) | (SEQ. ID No 32) | |
| LAT | 122 | CACTTCCTTTCAGGGTGGTGCTTCCTGACAGCACCCCGG | CCACTAGCACTGCTGCCCCATCAGCTCCTGCACTCAGCACC | control |
| | | (SEQ. ID No 33) | (SEQ. ID No 34) | |
| NCAM2 | 128 | GCCGCCAGCAATCTCAATGCCTCAGAAATCTTTTAATGCC | ACAGCAGAGAGAGGAGAAGAAATGACATTTTCCTGCAGGGC | Control |
| | | (SEQ. ID No 35) | CTCAG (SEQ. ID No 36) | |

The application's sequence listing, which the Patent Office published only in electronic form, follows.

SEQUENCE LISTING (79 sequences)

SEQ ID NO: 1 - DNA, 27 bp, Artificial Sequence
  Description of Artificial Sequence: Synthetic probe
ccagatctctgcgtctgcaattttgtg

SEQ ID NO: 2 - DNA, 23 bp, Artificial Sequence
  Description of Artificial Sequence: Synthetic probe
ctggaacagtccctatctgtcag

SEQ ID NO: 3 - DNA, 25 bp, Artificial Sequence
  Description of Artificial Sequence: Synthetic probe
ccaacttggcaactgtacatttccc

SEQ ID NO: 4 - DNA, 31 bp, Artificial Sequence
  Description of Artificial Sequence: Synthetic probe
catctccgacctgaaatggatgcccctttct

SEQ ID NO: 5 - DNA, 33 bp, Artificial Sequence
  Description of Artificial Sequence: Synthetic probe
caatgactcgcaaccactcaccgtctacttctc

SEQ ID NO: 6 - DNA, 25 bp, Artificial Sequence
  Description of Artificial Sequence: Synthetic probe
cctgagcctcctgcagatcatggac

SEQ ID NO: 7 - DNA, 33 bp, Artificial Sequence
  Description of Artificial Sequence: Synthetic probe
gaccagcggtcagagccttctgatcattccagg

SEQ ID NO: 8 - DNA, 29 bp, Artificial Sequence
  Description of Artificial Sequence: Synthetic probe
cactcgccgcagcagccaagcaatggcag

SEQ ID NO: 9 - DNA, 37 bp, Artificial Sequence
  Description of Artificial Sequence: Synthetic probe
cacagccaatctgccacatgtgttcaatgaagggcgg

SEQ ID NO: 10 - DNA, 30 bp, Artificial Sequence
  Description of Artificial Sequence: Synthetic probe
ggtcccaagcagccagagcgagagccacag

SEQ ID NO: 11 - DNA, 32 bp, Artificial Sequence
  Description of Artificial Sequence: Synthetic probe
ggtcacactcaactgccctgaactacagccac

SEQ ID NO: 12 - DNA, 40 bp, Artificial Sequence
  Description of Artificial Sequence: Synthetic probe
ctaccaagaagaagagagtcacacgtgtgaagcagtgtcg

SEQ ID NO: 13 - DNA, 35 bp, Artificial Sequence
  Description of Artificial Sequence: Synthetic probe
ctgattcctccgtgttgtgatgtgatgctggccac

SEQ ID NO: 14 - DNA, 40 bp, Artificial Sequence
  Description of Artificial Sequence: Synthetic probe
gtttccaaacggcagctccactgggtcccctttggttgta

SEQ ID NO: 15 - DNA, 43 bp, Artificial Sequence
  Description of Artificial Sequence: Synthetic probe
gtgttatcagccacgtaggggatgccttgaaagaccactcctc

SEQ ID NO: 16 - DNA, 35 bp, Artificial Sequence
  Description of Artificial Sequence: Synthetic probe
caagtccagaggccgggtttgtgctataggaattg

SEQ ID NO: 17 - DNA, 38 bp, Artificial Sequence
  Description of Artificial Sequence: Synthetic probe
ggaggtcagggacagctttcaacagtcctgttggtcaa

SEQ ID NO: 18 - DNA, 46 bp, Artificial Sequence
  Description of Artificial Sequence: Synthetic probe
cctcggccgaatggagtttcctagttacaccatcaatcggaaaacc

SEQ ID NO: 19 - DNA, 48 bp, Artificial Sequence
  Description of Artificial Sequence: Synthetic probe
ggtgtctgaagactacacacaggtgagtgaaaattttctaccagctcc

SEQ ID NO: 20 - DNA, 39 bp, Artificial Sequence
  Description of Artificial Sequence: Synthetic probe
aagtaaggatctcagaatgtgcttgggtcagggggaaca

SEQ ID NO: 21 - DNA, 46 bp, Artificial Sequence
  Description of Artificial Sequence: Synthetic probe
gtcatggaataccttcacgtgcttagccggcccaaagtcatcgacc

SEQ ID NO: 22 - DNA, 46 bp, Artificial Sequence
  Description of Artificial Sequence: Synthetic probe
aggagcatgatgtggtgtggaccgaagcttacattgacagcactgt

SEQ ID NO: 23 - DNA, 24 bp, Artificial Sequence
  Description of Artificial Sequence: Synthetic probe
gcgacggatgctggtgcagacaca

SEQ ID NO: 24 - DNA, 26 bp, Artificial Sequence
  Description of Artificial Sequence: Synthetic probe
cctgcaggacctgaaagaggtgacgc

SEQ ID NO: 25 - DNA, 28 bp, Artificial Sequence
  Description of Artificial Sequence: Synthetic probe
gcttctccttctccttggggtgctggtg

SEQ ID NO: 26 - DNA, 29 bp, Artificial Sequence
  Description of Artificial Sequence: Synthetic probe
gtaagcccagacgctctggggagcacaac

SEQ ID NO: 27 - DNA, 30 bp, Artificial Sequence
  Description of Artificial Sequence: Synthetic probe
gacacgaggagaaagtgccatgtcacgtgt

SEQ ID NO: 28 - DNA, 32 bp, Artificial Sequence
  Description of Artificial Sequence: Synthetic probe
gtggcaagatgctgagctcggcttatatttcg

SEQ ID NO: 29 - DNA, 31 bp, Artificial Sequence
  Description of Artificial Sequence: Synthetic probe
gctggacaacctgcagtaccgcaagatgaag

SEQ ID NO: 30 - DNA, 35 bp, Artificial Sequence
  Description of Artificial Sequence: Synthetic probe
aagatcctgttccaagaggcacccaacggccctgg

SEQ ID NO: 31 - DNA, 40 bp, Artificial Sequence
  Description of Artificial Sequence: Synthetic probe
gtcagtcactggcctggaccccgaggcccgctacttgttt

SEQ ID NO: 32 - DNA, 32 bp, Artificial Sequence
  Description of Artificial Sequence: Synthetic probe
cttctggatgtgattccggtggatggggctcg

SEQ ID NO: 33 - DNA, 39 bp, Artificial Sequence
  Description of Artificial Sequence: Synthetic probe
cacttcctttcagggtggtgcttcctgacagcaccccgg

SEQ ID NO: 34 - DNA, 41 bp, Artificial Sequence
  Description of Artificial Sequence: Synthetic probe
ccactagcactgctgccccatcagctcctgcactcagcacc

SEQ ID NO: 35 - DNA, 40 bp, Artificial Sequence
  Description of Artificial Sequence: Synthetic probe
gccgccagcaatctcaatgcctcagaaatcttttaatgcc

SEQ ID NO: 36 - DNA, 46 bp, Artificial Sequence
  Description of Artificial Sequence: Synthetic probe
acagcagagagaggagaagaaatgacattttcctgcagggcctcag

SEQ ID NO: 37 - DNA, 27 bp, Artificial Sequence
  Description of Artificial Sequence: Synthetic oligonucleotide
gttttcacactgggcgaagggaggact

SEQ ID NO: 38 - DNA, 29 bp, Artificial Sequence
  Description of Artificial Sequence: Synthetic oligonucleotide
cctgagctctgcctcttccagtaacattg

SEQ ID NO: 39 - DNA, 25 bp, Artificial Sequence
  Description of Artificial Sequence: Synthetic oligonucleotide
ccgaggatacgctttcttgtgatcc

SEQ ID NO: 40 - DNA, 27 bp, Artificial Sequence
  Description of Artificial Sequence: Synthetic oligonucleotide
gcagcagcgccattagcatcataaacc

SEQ ID NO: 41 - DNA, 22 bp, Artificial Sequence
  Description of Artificial Sequence: Synthetic oligonucleotide
caaccaagtttggactcggggt

SEQ ID NO: 42 - DNA, 25 bp, Artificial Sequence
  Description of Artificial Sequence: Synthetic oligonucleotide
cttctccatcgtcttcgacgtcgtc

SEQ ID NO: 43 - DNA, 7529 bp, Homo sapiens
cctctgagcccagccctccctagcatcaccacttccatcccattcctcagccaagagccaggaatcctgattccagatcccacgcttccctgcctccctcaggtgagccccagacccccaggcaccccgctggcccctgaaggagcaggtgatggtgctgtcttcgcccagcagctgtgggagcaggcgggtggggcaggatggaggggtgggtggggtgggtggagccagggcccacttcctttccccttggggccctgtccttcccagtcttgccccagcctcgggaggtggtggagtgacctggccccagtgctgcgtccttatcagccgagccggtaagagggtgagacttggtggggtaggggcctcagtgggcctgggaatgtgcctgtggcttgaaaagactctgacaggttatgatgggaagagattgggagccattgggctgcacagggtcagggaaggccaggaggggctggtcactgctggaatctaagctgctgaggctggagggagcctcaggatggggctgatgggggagctgccagcatctgttcctctgtcatttctgataacagtaaaagccagcatggaaaaaaccgttaaaccgcaggttgggcctggccgttggcagggaagtgggcagaggggaggcccggccaggtcctccggcaactcccgcgtgttctgcttctccggctgcccacctgcaggtcccagctcttgctcctgcctgtttgcctggaaatggccacgcttctccttctccttggggtgctggtggtaagcccagacgctctggggagcacaacagcagtgcagacacccacctccggagagcctttggtctctactagcgagcccctgagctcaaagatgtacaccacttcaataacaagtgaccctaaggccgacagcactggggaccagacctcagccctacctccctcaacttccatcaatgagggatcccctctttggacttccattggtgccagcactggttcccctttacctgagccaacaacctaccaggaagtttccatcaagatgtcatcagtgccccaggaaacccctcatgcaaccagtcatcctgctgttcccataacagcaaactctctaggatcccacaccgtgacaggtggaaccataacaacgaactctccagaaacctccagtaggaccagtggagcccctgttaccacggcagctagctctctggagacctccagaggcacctctggaccccctcttaccatggcaactgtctctctggagacttccaaaggcacctctggaccccctgttaccatggcaactgactctctggagacctccactgggaccactggaccccctgttaccatgacaactggctctctggagccctccagcggggccagtggaccccaggtctctagcgtaaaactatctacaatgatgtctccaacgacctccaccaacgcaagcactgtgcccttccggaacccagatgagaactcacgaggcatgctgccagtggctgtgcttgtggccctgctggcggtcatagtcctcgtggctctgctcctgctgtggcgccggcggcagaagcggcggactggggccctcgtgctgagcagaggcggcaagcgtaacggggtggtggacgcctgggctgggccagcccaggtccctgaggagggggccgtgacagtgaccgtgggagggtccgggggcgacaagggctctgggttccccgatggggaggggtctagccgtcggcccacgctcaccactttctttggcagacggaagtctcgccagggctccctggcgatggaggagctgaagtctgggtcaggccccagcctcaaaggggaggaggagccactggtggccagtgaggatggggctgtggacgccccagctcctgatgagcccgaagggggagacggggctgccccttaagtgtcggtgaatagtgaggctggaggccggaatctcagccagcctccagcaccttccctctcaccatcccactgccccctcgctcccatgtttccacccggcaccctgatcctcacccgaatctcctttttttttttcttttgagacagagtttcgctttgtcgcccaggctggagtgcaatgcacgatctcagttcactgcaacctctgcctcctaagttcaggcgattctcctgcctcagcttcccgagtaactgagattacaggcacccaccaccatgcccagctgcttttttgtatttttggtagagatggggtttcaccatgttggctaggctggtctcaaactcctgacctcaggtgatctacctgcctcagcctcccaaagtgctgagattacagacatgagcctccgcgccttgcctcctcacccacctcttcactctgaatcctcatgaggcttctcagccctggatttcctgctgccatcctcacccagcacccacaactagcgcctgggcagggcagggctggcacctctcaacgtctgtggactgaatgaataaaccctcctcatccacccctatttatctccatcaccatttccccctctttcttgttcctggaaacggctgctgagtctccatcggccaaacttatctgccctgtgatttctttgacaattctccttttcccccagaacccaccctgggttgaccagagtctgggaagaaggacaagagaacccggcaaactccctcctaggattaactttgtaaagcacccttgccctgtagctgcaagggctgtggaacctgggcagcccgcaaccacctttagctctgggccccccaggccagcctggagcatggctgggtggggccaccagcccatgctctcaggcgggcctgtgatctttcccagggcacatggactgtaggctggccctggcccacaccaccacactctccccagccatggacagaggcagccagaggcctcacggtttctcctccgagtttctggctgggtgtagttctcagaaaccccagtgcctgcgtgtgtccactcgtgggtgtggtttgtgtgcaagagctgaggatttggcgatgcttgggaggggtagttgtgggtacagacggtgtgggggtgggaagtggtgcagagactgaagagggtcaacctgggcatgggggacacagggactgctgagaacgtgcgtgtcatctttgctctgatggggtggacatagcagaaaatctaactctgtctgtagccccatacagaatgccagggtgagcacagtggctggtgcctttaatcccagcactttggaaagttgaggcaggaggatcgcttgagcccaggagttcgagtctgaagtgagctgtgattgcaccactgcacttcagcctgggcaacagagtgagcccctgtctcaaaaaagaaaagaaaaagaaagccaggcttcatggaaagatcgtatgtgtgacccaaatatgagttcttcagctcagccatggtaatcccttccttgaagtctccatttctgcagtacacatgcatgtgcgctctctctctctctctctctctcacacacacacacacacacacacacacacgcgcgcgcgcgcgcgctctcctgcgaacagaggcagggggagaggggtttgccctggtctcggggactggtctggctggcgcttccccactgcacgtttccaggtttagtttgtctgtgtctcctcttccatcccaggggctgagccccttccatcctccaagaggaaccagtgagagtgagtgaaggaggggcctggagccagggacttcccctgtggggcctgggtggagaggggagaactcaatggtgctgcctttgagaccagcccaggctacagcccaggagcacacatgggccagggcagttggtatttcccgaggacaaagaggaaattttcaaagaggaagttgttgagttagagcttgcggtggctgagagcagacaggttgacctgcaaaaaaagacaggggaggcatgtgagtgtgacagccctgctctgtggcctgggcaggagatgggggaaagggtcaggtgggggatgggctcgtgcagtgggagaggagacggagggagggagcgggaaggggcttgcttagtgggtgggaagagctgagctcggatggaaccagcttctaccagccaggctgggcacccactgggctgcatctggtggccttttctgattgctatttggactcactgcagctgcagaatgacagaggccatgtccaaaatcccttagagacactgttgtcttagagttgttaaaataagagcccccatatcaggtttagaaaatactgtcaccgaacgaacgtcgctgtcctcagctccacctccctttcctttgacagatatggttgttttctaagccaggactggttttagtcaggtcctgggcgaatcctgaaaaaaagaggtagtacgggtaaggaaggcacccaacagggctttcacaatccagaaaatatcaaaatataagtgttaaaagagaggcacaggccgggtgcggtggctcacgcctgtaatctcagcactttgggaggccaaggtgggcagatcatgaggtcaggagtttgagaccagcctggccaatatgatgaaaccccgtttctactaaaaatacaaaagttagccaggcatggtggtgtgctcctgtaatcccagctacttaggaggctgaggccagagaattgcttgaaccctggagtcagaggttgcagtgagccgggatcatgccactgtactccaggctgggtgacaaagtgagactgtctcaaaaaataaaaataaataaaataaataaaagagaggcacaaacagtgttatgaatgcaccaaggaaaatggtgcattcataactctcaggtgaagcctaccaagccatgcgtgtgtgcacatatgtgtgtacgtgtgcatgtgcgtgcgtgcatgtgcgtgcgtgcatgtgcctgtgtgtgtatgtgtgcacatgtgtgtgcgcatgtgtgtgtgtgcgcgcatgtgtgtgtgcatgcatgttctcccatgcatgtgtactgtggcaagggagactttgaggaagagattccagtggctgagcagaagggctcgcattgccctggcgaaaggttggaaggcttcacctgagagtgtgtcgtggcctttgtcatatccactgcttgattcctttctttaaaaattatttttattgttttctacatatgagaaccaccacacctggctaatttttgtattttttgtagagatggggtttcaccatgttgtcccggctggtctcaaactcccgggcacaagagatccacctgcctcagcctcccaaaatgctgggactataggcatgagccactgcacccagccactgcttcattcctggtggctgctgtgcctggcatgttgcagatcctccatgaatatgcatttgaatgaatgaatgaatgaatgaatgaatgaatggagatgacgcctcagagattctttcttttgagatgaggtctcattctgtcacccagactagagggcagtggtgcaatcacagctcaccacagcctcaacctcctgggcctcccaagtagctgcgatcacaggtgtgcaccaacatgcccagctaatttttttttttaatttttaatttgtacagacagggtcttgctgtgttgcccaggctggtctcaaactcctgggctcaagtggtcctcccacctaagcttccccaaatactgggattataggtgtgagccactgtgcccaggcttgcctcagatatttgaaggctgggaaggattttgcaaagctgggaaaaggaaaaggcattcccagcagaggggatagcaggtggaaatacataattaaaaaaaaaaaacgtggagcagatccagcgcagtggctcatgcctgtaatcccagcactttgggaggcagagcagggaggattgcttgagtctaggagttcaagaccagcctgggtaacatagaaagaccctgtctctacaaaaacacaaaaaattagccaggcgtggtggtgcatgcctgtagtaccagctacttgagaagctgaggcaggaggactgcttgaagccaggagtttgagaccagcctgggcaacatagtgagaccccgtgtctacaaaaagtaaacatttatatatatattttttaaagtggagcagttcaatatagagtcttttttgaacaaacgtgaaatagatgtcttttttttttttttgagatggagttttcactcttgttacccaggctggagtgcaatggcgtgatcttggctcaccagaacctccgcctcctgggttcaaacaattctcctgcctcagcctcccaggtagctgggattacaggcatgcaccaccaaacccggataattttgtatttttagtagagatggggtttcaccatgttggtcaagctggtcttgaactcccgacctctgctgatccgtatgcctcggcctcccaaagtgctgggattacatgcgtgagccaccgtgcccgacaatagatgtcttttaattttctggaggaaaaagcaaagcaaaagaagcagtggatattttaagactaaaaaggaaaacaaaaaaaggagatagagcaggccagacgtggtggctcaacgtctgtaatcccagcactttgggaggccgaggcaggtggatcacctgaggtcaggagttcaagaccagcctgaccaacatggtgaaaccctgtttcaaaatacaaaaaattagctgggcgtggtggcgggcacctgtaatcccagctacttgggaggctgaggcaggagaatcccttgaacccaggaggtggaggttgcagtgagccgagatcacgccattgcactccagcctgggcgacaagtaaaaaactccatctcaaaaaaaaaaaaggagatagagcaaggaacagtaagaaaatagttgggtgcagtggctatgcggtggcactataggaggctgaggcgggcagatcacctgaggtcaggagttggagaccagcctgggcaacatagacccctatctctacaaaaaatttgaaatatgaaaaattagccaggtgtagtggtgtgcgcctgtggtaccagctactcaagaggcgaaggcagggaagattgcttgagcccaggagtttgaggctatagtgagctgtgatcatgccactgcactccagcctgggcaatagtgtgagactctgtctcaaaagaaagaacatggccaggcgtggtggctcacacctgtaatcccagcactttgggaggccgaggcagtcagatcatgaggccagtttgaaaccagcctggccaacatggtgaaaccctgtctctactaaaaatacaaaaattagccaggcgtggtggcatgcccccgtaatcccagctacttgggggtctgaggcagaagaattgcttgaaaccgggaggcagaggttgcagtgagccgagatcgtgtcattgcactctagtctgggcgacagagcaagactccgtcttggaaaaaaatttaaaaaaa

SEQ ID NO: 44 - DNA, 4650 bp, Homo sapiens
ttcctccctcccgccggccggggtgcgcgggcggcggggcggcccgcgggccatgcgttcggcgcggcccagcccggccggccgggggcggcgccccgagcccgggccccgcgcggcccgcgcccccggcccccgctgagccccgggggccccgctgcggccgaggccatgttcccggtgtttccttgcacgctgctggccccccccttccccgtgctgggcctggactcccggggggtgggcggcctcatgaactccttcccgccacctcagggtcacgcccagaaccccctgcaggtcggggctgagctccagtcccgcttctttgcctcccagggctgcgcccagagtccattccaggtgagtagggccggccgcggcggcccgggctggggggggacgcccgcccgcacccgcggcccactcggcgccttgtctccgcaggccgcgccggcgcccccgcccacgccccaggccccggcggccgagcccctccaggtggacttgctcccggtgctcgccgccgcccaggagtccgccgcggctgctgcggccgctgccgccgctgctgccgccgtcgctgccgcgcccccggcccctgccgccgcctctacggtggacacagcggccctgaagcagcctccggcgccccctccgccacccccgccagtgtcggcgcccgcggccgaggccgcgccccccgcctccgccgccactatcgccgcggcggcggccaccgccgtcgtagccccaacctcgacggtcgccgtggccccggtcgcgtctgccttggagaagaagacaaagagcaaggggccctacatctgcgctctgtgcgccaaggagttcaagaacggctacaatctccggaggcacgaagccatccacacgggagccaaggccggccgggtcccctcgggtgctatgaagatgccgaccatggtgcccctgagcctcctgagcgtgccccagctgagcggagccggcgggggagggggagaggcgggtgccggcggcggcgctgccgcagtggccgccggtggcgtggtgaccacgaccgcctcggggaagcgcatccggaagaaccatgcctgcgagatgtgtggcaaggccttccgcgacgtctaccacctgaaccgacacaagctgtcgcactcggacgagaagccctaccagtgcccggtgtgccagcagcgcttcaagcgcaaggaccgcatgagctaccacgtgcgctcacatgacggcgctgtgcacaagccctacaactgctcccactgtggcaagagcttctcccggtgtgcacggggcctcggccgcccgctaggccgtggggagggagggacgcgacggaggtggcctggccgtggctggcggggagggaggcggctgctgaggctggggaaggggagccactcccagggcggagggaggaagcctctcccggttaccagggagcaaggggtggtcctttgtcgaggaggtgggccttggggttgacggaagcttcgcgtgggaggaggcggcggcggcggcagcggctgctgggctccaggggagggatttcctgcttaagtgtcgctgtgacggcctgggctccgggaggaggcgcagggatcctcggaaaggcctgtggtgcggtttggtggatttggggcgcaccacctccgccctaaccccaaccccaacgtgtccccaggccggatcacctcaacagtcacgtcagacaagtgcactcaacagaacggcccttcaaatgtgaggtaggaagcccgcctcctcctgtcttggttttcatgattttgatcctcatggtagctgtctgagtcagtctctcagaccccctttttctctctcttctttttgcctttttgctccattttctcatcccttcttcaaggcctcatcatgtcactcccatttcctacagatcaaagatccccaaggctctgattcctttaatctcttgctcccccctccccagcccaccaagctttaactctcctgtgacaccccccacgcccctcccccctcctcagaaatgtgaggcagctttcgccacgaaggatcggctgcgggcgcacacagtacgacacgaggagaaagtgccatgtcacgtgtgtggcaagatgctgagctcggcttatatttcggaccacatgaaggtgcacagccagggtcctcaccatgtctgtgagctctgcaacaaaggtacatgccgagggctgccgggagggccaggggcagagggtgggcgcctggccagacgccttgccacggatacgggttaagggtgctgtagccaagagctcgtggcgtctagattcctacaagaggtcaagggagcagcggggggacacctgaatgaacatcattagactctaagaagtcctggttggaagagatgatctgccagagaggttgaacctcctggtaatgtgtggggaaagcgggagtggaacttggctgctctggggaaggagtagtcaagaaagccagttccaggggtcacaaggcaaggtttccgctgcgcagccacaaggtcttgtctccagctcctggggcaggtggagtacacgggccgggctttaccagcacgcaccctgcacgggtagcagagaaagctgccttcagtcagactcaccggttaactgggttgagaccgcggggcactggagggaaggggacacagccgtctctgctgagggtcaaccctgcaagtggctaggagtcagtgtctcgtcatcctgggagaggtctcccggccatggagaatgagttctgtaggtaccaaggctgagaagcgggcaccacacaagccaggccccaggctcagggaggggctgtgtctaccagccccaacagagcagttggccccaggctaccaaggataccgtgggaggaggacagggccatctgaggagggcatcccccgcctaggagatcagccccgtctctggggtctccgcctggctgacccccgccccatcccaatccaccccccaataggcttcaccacggcagcatacctgcgcatccacgcggtgaaggaccacgggctccaggccccgcgggctgaccgcatcctgtgcaagctgtgcagcgtgcactgcaagacccctgcccagctggccggccacatgcagacccatctggggggggccgccccccctgtcccgggagacgccccccagccacagcccacctgctgagggggacccccgcacccaccaggcaaggcgtggggcatggctggggggcgggatggggggtgtgggggacaacggggctcaaagggcccaataggggatctcaggaaggcgagggatgcccatgtaccactcaggctagggagacttctgggcacagggaggatccttgagaactgctctgtctgggtgaggatgcaggctgaggcctctggggtccagataggaagtgagcaacggctgtgtcccaggggaagcaggctgggaaggtgtggggtgagggcaaggctcttgccattcagatcgcgctgtgatccgtggtgtttctcctgtgcaggtactggtgaggtttgtccaatggcggcggcagcggcagcggcggcagcggcagcagcggcagcagtagcagcccctcccacagctgtgggctccctctcgggggcggagggggtgcctgtgagctctcagccacttccctcccaaccctggtgagctccaagttggttgcgggggagaggggagaatggagtagagtcccttggtacaagctcctctcccccctcttttcccaccaactcctatttccctaccaaccaaggagcctccagaaggaaaggaggaagaaatgttttcttaggggaattcgctaggttttaacgatttgtttctcctgctcctcttctgtcagacctgaccccacacaaacctgtcccctcggttgtgttgaagtcccctggacagtgggcaggggtggcagaggacacgagcagccactgcccgtaccccctctcctctctgtaagcccatgccctgtcttcccagggacttgtgagcctcttccctcgacggtcctcttctctccttccagtcctctccccctgctgtctgcagcccctccccggggagttggtgctttcttttccttttttttttttttccagggggagggaggagaggaaggagggggatcagagctgtcccaaagagggaaagcggtgaggtttgaggaggggcagaagcagggccggcaaaggttgtaccttcataaggtggtatggggggttggggtcaggccctgaacatcgtcctacttgagaatctgtcaggggaaaaagtcaaggggagcaggaggaagagccaggagggccagaggcagagaagagatggagtcttaggggccagggtgagcgaggggtccagggcctagaggtgcttcctgggggcgggggaatgcagccagtgtccccctcccctcttccaccccagctccagccctggtcttgtcttttcatccctcttccccacgacagaagaagttgtggccctggccatgtcatcgtgttcctgtgtcccctgcatgtaccccaccctccaccccttccttttgcgcggaccccattacaataaattttaaataaaatcctgtttctggctctggattgaa

SEQ ID NO: 45 - DNA, 18360 bp, Homo sapiens
gagaccgggacgagaccggggctgtggtgcggagagaggctgagacggagaagaggagaggcagagagggcgcggggaccgtcagcagcaccttagctacaatcgttcagctattctcggaagagagaagggagagggaggaggccggggcgggagtgggggctgtcaccctcggaccccggcgtgagaggggccgtgcggccggacgtcctcggggtgggcccccagtcggtggccgaagacctacagctcaggcccctgggtcccaaatttccaggctttgcccctcctcctttctcagatacccgggtaacagtcctcatagtccagatatccgggactcgggtcccaacctctctaaacctgggtctctgtttcatagaatttcaaatatcaggttcaggcccctgcgtgcaccagtatccggggttcattccccgggcgttcaaatatcggattcagtctccatcccgttcagatattcggggttcagaccccacaatcagaaatccggaattcggcagctgtcgccctcgacgagggggaggactggaccgcgaggtcagattaggttgtcaccccctcccctccaggggaggcttcccgggcccgcccctcaggaagggcgaaagccgaggaagaggtggcaaggggaaaggtctccttgcccctctccctgcttggcagagccgctggaggaccccaggcggaagcggaggcgctggggcaccatagtgacccctaccaggtgagacacggggtgcaggggcgcgggtccctgtgtctagttctgagaagaaagggtgcgcctttctgagaagctggacttgggtaggccctctcaggatggggaagcccagctgagcgagtggtcagcctctggctagccttgccttctgttgccacccccttccccttcctcttcccttcattgtgtctggttggtgggggacctcaggtgacagggtctctgatgtcaccggcgttcacaccctagggtgcttcagctaatcagatggatttgcacttcagtcttctctccttcactttgcccctcacagccacctctcctccctgatatgtcccgttctcctggctattctgtggttttgattcccatgcctctgattcccatggtgggtctgcttatctgcttttcaggcctggtctggttggatttcttgtccttgcaaggaagtgtgtgtatatgtgtttgtgtgtatgcgtgtgtgtgtgtgcttggaggtgcctggcaatgttttcccccagctgcagttaccttccaacctcttgctgtgatggtgtcaataatctcatccatttgtcaaacgatctgtcttttacaaagtgctttgacagccattctctcatgtgacatccccgcattcaccctgtgggggcctcttttattggcatcttcccattttacagttgagaacgttgaggccgagagaggttgcccaaggtcacacagtggcagaaccagaatttgaactcaagtcctcaatcacatctttccctgatgcatgcctggttcttgccatctcttttcctctgagtttgggctcggccaggggtccctaggagtccaggctggggtgaggtttaagaatggggatgagatgagcttcctttccaggagggctctactcagaagcttttcctgatgggagcctctggcttttgcctctgcctcatggagttttctatccactgtgaccttcatctttaccccaatcccagggtttggcctggattcctgagagggctctctcctgacaaatggtagcactagtggcatcttttaactgttcaagccaagctgttggggtagaatgatcccccaaaggattaaagctttgtggggaccttggaggcagggaaggaaaaatccatatgctgagtgtctgcatggtgttcctaagtatgagatctcattaaaatcttaacaacagctccatgctgtaatccatttcactgaagagaagaccaagaactggaaggaacttatttaaagccctgttgctgtacattgcagacgggatgtactggtagcatagcttaggaacagatagatacgggtttcctcatctgtagaatggagataacattgttcgttttggaaggtggttatgatttagcacagaccttggttattgttcaagtgtttgttgttattatggggaaggggacctgcatgatgttttgccagtgggtggcacccctccgtgtggcctaggttagcattctggggccttgtgttggtaaagaggtcaggaagattcctttggcaagttgagagcacctgcctttgtgtgtgggtgtgtggtgctggtgaggggtgcttggcactgttgctggcagaagggagaaaagggccggctttgagcaacctgcgagctgctgagggctgagcagagagcaatcactcagtctcccaggctattctgagccctctgcaccctgggggcccactggagagtcaggctccctccttgccctccagcttccagttgggctgagacaaaattaacaacacaacaggaaacaatgcatgacagaataaattacatgctaaaattgttaggtgcttttgagtagctagaactctgccccaggagtccagctctgctgaaggctcctttgtgcctaaattctgacaagtgcttaggctggagcctgtcttggaatctccttgagggttttggttctggtatcctgcaggaactttctccgggtgtttggttgggtgccctaggtgctcttcccaatggctggagtggtcaggacaggcttcctgcaagaggggagctgagcttggggtgacagctgagagagtaatggatacaggcctaaccggggagccgaaggtcctgttctctgaccttggagaagtcctttttcttctctgtgcctcagtgacctcacctaggaaatggtgatcatgattctgccctgcctgtttcgaagggctgctctgaaatcatagtgatggaggaccagctttggacaaggcacttaaccttgctgagcctgtttctttatctgtaagataggggaaatcatagtacttgcttcataaggttgtagtgaggactgaatagagataatgcacgtaaggtactcagtaaatgttatttgtaccctgcaaatgtcctgtacctgtgtgtgatgcttatgcagttggacaggacaagtaaggtggcccagagcacagagaggccctcatagccagatgccatttatatccctattcttcccattctagatctccccctgacttttttgagagtgactttgcgggctcctctgggccagtacccacttctaacaatggacggatttccaccgcctccggcctggccatttcctgttctcttccagggtgtgagaggttgagggaggagggggcctcagcgccaaggggaacagaaaggtgcctggaaacagttggggtataggacttatgggacaggacacttggggctctggagtgctggctgggaagcagaatgttttatccttgaggggagatacaggggctatagggaaatgagaacttgttgagcactgaagggggtggtgaggatacttagcttcccagaatcttcctagcagttttagggactccagggacccagcccgcgtgatctggttgccagggcaacttcattttttggagctttgatgttgttcctaatctccccctccccttcctcagcagtgcctcctcctcatcagggaatgaggggaggagatggcagaaacttgatgggtcccttcctctccctgaaggctcaatccttgatctctaagggtcccatttccattcctcaggccaggccccactctcagggcccccaggggccaccatgccagctgggggccgggccgggagcctgaaggacccagatgtggctgagctcttcttcaaggatgacccagaaaagctcttctctgacctccgggaaattggccatggcagctttggagccgtatactttgtgagttgggtcttgggagggtgtaatagggatggggactcttcctatccctgtggacttcccaacagcccttgcacactactccatcacactggtctttcctgccttctcttgctgggccagcaagtcttcccatgcccggctctcaatggggccttcaacaccttctggtctggtcctctaggcccgggatgtccggaatagtgaggtggtggccatcaagaagatgtcctacagtgggaagcagtccaatgaggtgggccaggtgcaatacagccaggttggggacaggggactcctgtctcaagatgcaagctgggtaacctctgcctaccctgaccccctagaaatggcaagacatcatcaaggaggtgcggttcttacagaagctccggcatcccaacaccattcagtaccggggctgttacctgagggagcacacggcttgggtgagctggtgccagattctggcctgatctttactcctattcatgcccgtccttatcgtagtccagtctcttaggtggtccctgttcgtggtgctgttgtgggatcttgggaaggaggaagtctcttttgaccgctttagtcctcagacatacccactgagcaaaagcctggctcagtgacacaggctgttagcaggtgggacaggtcactgtgggctggagaaggtggagattgaatgggagtttgaagggattcagatgggcagtggtgaatgtcttgggcccagactctagaaactctcccaccaccccctcattgtctccagttgcgcttcctccctgtcatcaccccggggacatagcttgagtacaggacagtcaaggaagctctgttttgagtccctgcccaggagactctgatctctgacccttgtctcttccttagctggtaatggagtattgcctgggctcagcttctgaccttctagaaggtaagtgactgataggccaataagtggagaagggagaagagcaggggagccatagggaagggttaaggggagtttattccagtcccacccttgcgctccctcgggttgatgttcttcctcactctccagtgcacaagaaaccccttcaggaggtagagatcgcagctgtgacccacggggcgcttcagggcctggcatatctgcactcccacaacatgatccataggtacaagcagcaccggcagtgcctgggaggggagtgctatctgcaccacctgtcacttagctgggctgcccctgcctagctttcttgagacacatgtctcatccctgtactttgcctctggcagggatgtgaaggctggaaacatcctgctgtcagagccagggttagtgaagctaggggactttggttctgcgtccatcatggcacctgccaactccttcgtgggcaccccatactggtgagtgagtgagtggtggtgagtggagagacctcccagggatgttgggagtaggagtgacagggtctcggcgggtgatttgcctctctctcctgaccattctcctaggatggcacccgaggtgatcctggccatggatgaggggcagtacgatggcaaagtggacgtctggtccttggggataacctgcatcgagctgggtaagaacatcctccctgttccctcatcatcttttccattctttcctgttagttcccagactccggactacccccttctcctagggatgggatcccaggcctccaagttcctgtccgttgtgactctaccctggagcccaatacaggcagctggcaaattctgccagctcttaggcctagagattttgtagcattcatctcttcctgtccactaccctggttctgaatcttttcttagtgcccaccatgtgctgtgccatggactgtgattctggagggatagcagtgaatgaaaatcctgccctcatggaacttacatttgatttagggaaaccaggcaggcatgttttctttcaatgtgatgaacgctgtgtggagaagttacaggagcggttcaaatgtaaaacaggggacttgacctagtttaggggctgaagaaggcctccttgtaggagaatattgaagccaacctgcaagataaataatagctgtttgcagaatgtagggaagagctttccaggcagagagaacagcatgtgagaggcctagaggtaagtgcaggcctggggaactgggactagcttcagttatttggaacctagcatgtaatgcagagaatattgaaggataaggccagagagttaggtccaagtgagttcctaaggccttgaagccatgccaaggttctcatctctgtcagccagcactattgaaacaattctttaatgaggtaggtaacctttataaggcttccaacacaatgccaggcacaaaacagttgcctaagagttgctgttagtttctcttatcaacagcctcctgcagtgatctctccagtctcttctcccttccagtctgtcttaagtactgatgccagagaggtctgcctaagctcagtgctgtcatttcactccctgtttggagccatgagtggccccctgttgccttcaagactgaagccatccccatccttcctcccaccaacctagaggctttgcttcgtaaatgctggccctttccttcatgggctccaccctctgagtgtgtcatgaactcttccacttccttgccttggttcgtattgggtcctctgcccgaggtcagagatttggacgagcccttctcctccatcttcacagtctccatttaccattagatgccaggcccagacagttgatgaaaaatgtaagaaacggacccaagtataagaaaaagctagatctgtccattttatttctagtttttggaagagatgtggatacagagaaatattactctactattgaaaaaaatatatatcagtctgattataaatgtcaactcatactaagtcaatatcagggaagcagtgtggagaaggatgtggcaaactggagattgctgtttccatagaaagagggcagctaatgcttatctccagaccattgttatgcagtaatgtagactccatttcaccagatttaattcttaaggagaaactggaaacttgtattattatttgattattacttttggcagttaattttaaaaatcaccgtttaggccaaaacaacatgacatttgtctgggctacaagggactcttagcgactcttagcttgcacttacctttctaatctcagggctttttacaaagcccttctctgaattccctgaagatatgctagcttgaaggctcactgcatactctcaacttcccagccacttccctgtttccctcttataccagttaatactttgatgttattttttcagtcctatttaatcttttagactggaggttccttgagggtggggcctaattcttgtttttatcttccccatagcaattatcaagttatctgctccctttggcacctaagaaatattagttggggtgataactgaatggctgtccttctgccttcgttactgcttttgtggatgttattttctttgacccctattccacccgtgtgcagtggagaggatgggtgttgtattttacagaggaaggaattaactgagacgcaacaggatgatgggaacttctcaaggtcatgtggcaaggaagtcaaggaattggggtttgaacccaagtcgtctcagttccattccattgtcctctaccccctgccacctctcaccttcttccctttcacctttttctgtagctgaacggaaaccaccgctctttaacatgaatgcgatgagtgccttataccacattgcacagaacgaatcccccgtgctccagtcaggacactggtgaggactgagattccgaatctgggcccaggcgttaggccatggggtatggatgcctgactcatgccttccccacccctctcccaccctcctgtgactttcaggtctgagtacttccggaattttgtcgactcctgtcttcagaaaatccctcaagacagaccaacctcagaggttctcctgaaggtgagggcctgctggcctagcattctcctggaactgtagcttgttacagccacaagaacccccagggaaattagtggttcccagttcctcctccaccaagagcttcgttgatgaattcccaccccatccccaatgcctagtggactctgtgttttacaagattttgtctaccagactgccttaatttattaagtaataaactgttttcccttcttttattaatcaaagatttatataattgccagccagagcttctggtcagcatgtgataaccagggttgccccactgatctgatgtaatgcaagccaaaagcctgtgtagccttatcatgggtaaatgtatgatttcccttaggtgttttttgaattatcaaaaatggaggggccccattcccttcacagacccatgggggcctgaggagccgtagttggaaacttcagattatgtagttggacccacttgttttataattgtaggatactgtatgaagcccagaggggcctcatgacatgtccaaggtcacatagccctttagtagaggagctggacgagaatccagttctcctgactgtccctgcctgtcagccatgcttagaggaagaagagtctgtctggggagtaggtactgggtggtacagaaaattgtgagagaagggcttgggataaggccagcatcaacccgtggtgggcgtgggccccagaagagtgcctcaggcctgagggaatgccaagggctgtgggttgtggggggaaggggagttggcagcagacctcagtgccctcttcccccagcaccgctttgtgctccgggagcggccacccacagtcatcatggacctgatccagaggaccaaggatgccgtgcgggagctggacaacctgcagtaccgcaagatgaagaagatcctgttccaagaggcacccaacggccctggtgccgaggccccagaggaggaagaggtgacccagcttgccctaacacccctctttataccccatgtgtgcctgccccctgcagttgcttggccccttccccagccctactcacaccaccatcttcccatgctacctccatgcatatgccccagggcttccccttccctgtccagcagcctacgccctgttcgcaggaggccgagccctacatgcaccgggccgggactctgaccagcctcgagagtagccactcagtgcccagcatgtccatcagcgcctccagccagagcagctccgtcaacagcctagcagatgcctcagacaacgaggaagaggaggaggaggaggaggaagaggaggaggaggaagaaggccctgaagcccgggagatggccatgatgcaggagggggagcacacagtcacctctcacagctccattatccaccggctgccggtacacagctcacccttgggggacccgagccacctgctctagaactgcctgggtcttcgccctccttccctaagtgcagcactcctctgagtctgattggctgtcctcaggtagctctctttggacccagtggcctctgagccttgggtgttccttctatctccctctagggctctgacaacctatatgatgacccctaccagccagagataacccccagccctctccagccgcctgcagccccagctcccacttccaccacctcttccgcccgccgccgggcctactgccgtaaccgagaccactttgccaccatccgaaccgcctccctggtgagtgtagccatcctcactcagcctgctcgctgtctgttttttaagtctttttaagtctagaaatgatttcctccctgtggcatgggattgagtctggattctaccctcattttctgttgctggctcctgcctgctccccttaaccctcctgcttccctcctcttcccagtggactgttttggtcatatggcccaatctgggtgtttctagcttggcaaactcttactccgtttttgtggcctgacttaactgacatctcctgggttgccttcccaggctcctctggtgagtcagatgcttcacagttgtgtgctggggaagcccagtgctgggggagccctgtgcctgtggagccctgtgctgggggtgtccagtgctggggagccctgtgccgggggtgccctgtgcttgggtggtcctgaacagcatcatgataggtttgccagattctgtgccccagagggcagggatggtgttcagatatctgtctcatgccagcagttagctctcaggcttacacacaggcctgtgttaaccctcccagcccccctgggaggggaagggtaagatcccattggagaaatgaggcacctgtggctcagaggggccacttgccccagtgcctttggtggctctctgctcctgtaagcaggcccttagtcctctcctaaaatcaactcatggcagtctttctcagttcacaggaaaaagtgtttaggcttttcataaaacatagtttttcatctatgtttttagatcacgttcctgctgagctgcatttgagcgtcaacaatccccttagaggccactgattaagtctagtatgttcttatggcctctgcttggtgctggttgtgttccaacaattcttcagatcccatggtgttgtgcggtactgtgctgagaggtcttgactgccaggggcttggctgccgggactagtttgagagccactcatagagtcaattgagaatgagacctgagatcagactttggatgaaggtgtccaagcccagtgttcttgttattccagcatcttgtggccccgatcccacctcaatacctggggagtgataggccgaccatgtttgctgaaggggaaggaagccaacacttattagatagagtccgaacttaccccacagcccctatgaggaggtattatttccccatttaacagatgagggaactggtgctttgagaagttaacttacttgagatcacatgcttggtaagtggcaaagctgggatttgatcccaggtatgtctgactcactgtttcaaattagtatggattgttcctacttttgtgccaggccctgtgctcgccaccttttatcattcggccacaccaacttgtgatgtagataatatcaccattatccagttgaggaaacaggctagagtggccgtgtgtgaggaaggtgttaaatgagaatgaaacccatgagttgaaaacccatgctcttccccacggaagaccccttgtgttaattaactaggggccaggctgagccccagctctcaccctctctccttccccaggtcagccgtcagatccaggagcatgagcaggactctgcgctgcgggagcagctgagcggctataagcggatgcgacgacagcaccagaagcagctgctggccctggagtcacggctgaggggtgaacgggaggagcacagtgcacggctgcagcgggagcttgaggcgcagcgggctggctttggggcagaggcagaaaagctggcccggcggcaccaggccataggtgagaaggaggcacgagctgcccaggccgaggagcggaagttccagcagcacatccttgggcagcagaagaaggagctggctgccctgctggaggcacagaagcggacctacaaacttcgcaaggaacagctgaaggaggtgagctagggctgcttgggggcggagccgatggcgagccaggtgggtcctgaccctgcttccctctgcactcgcccaggagctccaggagaaccccagcactcccaagcgggagaaggccgagtggctgctgcggcagaaggagcagctccagcagtgccaggcggaggaggaagcagggctgctgcggcggcagcgccagtactttgagctgcagtgtcgccagtacaagcgcaagatgttgctggctcggcacagcctggaccaggacctgctgcgggaggtaggcatcccaatctctgttcccctcccgctcactcgtggatcccagggacccacccttttccattttcctcattcttgtcttctttctccttggccctcgagtgttacagttcagctttgcttcagtgccccttttacttctcatccccaacagaccctgccagaatttccttaggcctcttttcccaggccagggaggagcttgcctcccctacaccctcatctcctgccatccccagctccctctgccaaggagccctggcccctcacttccttgatactgaccaggccctgggccctgtgtttcttccgccatccccagctccctctgccaaggagccctggcctctcacttccttgatactgaccaggccccgggccctgcatttcttctgcctcaggacctgaacaagaagcagacccagaaggacttggagtgtgcactgctgcttcggcagcacgaggccacgcgggagctggagctgcggcagctccaggccgtgcagcgcacgcgggctgagctcacccgcctgcagcaccagacggagctgggcaaccagctggagtacaacaagcggcgtgagcaagagttgcggcagaagcatgcggcccaggttcgccagcagcccaagagcctcaaagtacgtgcaggccagcgccccccgggccttccactccccattcctggggctctgggcccacccaacacaggcacccctatagaacagcagccctgctcacctggccaggaggcagtcctggaccaaagaatgcttggcgaggaggaggaagcagttggagagagaaggattctgggaaaggaaggggccactttggagcccaagcagcagaggattctgggggaagaatcaggagcccctagtcccagtccacaaaaacatgggagcctggttgatgaggaagtttggggtctgcctgaggagatagaggagcttagggtgccctcccttgtaccccaggagaggagcattgttggccaggaggaggctgggacatggagcttgtgggggaaggaggatgagagtcttctggatgaggagtttgagcttggctgggtccagggcccagcactgactcccgtccctgaggaggaggaagaagaggaagagggggctccgattgggacccctagggatcctggagatggttgtccttcccccgacatccctcctgaaccccctccaacacacctgaggccctgccctgccagccagctccctggactcctgtcccatggcctcctggccggcctctcctttgcagtggggtcctcctctggcctcctgcccctcctgctgctgctgctgcttccattgctggcagcccagggtgggggtggcctgcaggcagcgctgctggcccttgaggtggggctggtgggtctgggggcctcctacctgctcctttgtacagccctgcacctgccctccagtcttttcctactcctggcccagggtaccgcactgggggccgtcctgggcctgagctggcgccgaggcctcatgggtgttcccctgggccttggagctgcctggctcttagcttggccaggcctagctctacctctggtggctatggcagcggggggcagatgggtgcggcagcagggcccccgggtgcgccggggcatatctcgactctggttgcgggttctgctgcgcctgtcacccatggccttccgggccctgcagggctgtggggctgtgggggaccggggtctgtttgcactgtaccccaaaaccaacaaggatggcttccgcagccgcctgcccgtccctgggccccggcggcgtaatccccgcaccacccaacacccattagctctgttggcaagggtctgggtcctgtgcaagggctggaactggcgtctggcacgggccagccagggtttagcatcccacttgcccccgtgggccatccacacactggccagctggggcctgcttcggggtgaacggcccacccgaatcccccggctactaccacgcagccagcgccagctagggccccctgcctcccgccagccactgccagggactctagccgggcggaggtcacgcacccgccagtcccgggccctgcccccctggaggtagctgactccagcccttccagcccaaatctagagcattgagcactttatctcccacgactcagtgaagtttctccagtccctagtcctctcttttcacccaccttcctcagtttgctcacttaccccaggcccagcccttcggacctctagacaggcagcctcctcagctgtggagtccagcagtcactctgtgttctcctggcgctcctcccctaagttattgctgttcgcccgctgtgtgtgctcatcctcaccctcattgactcaggcctggggccaggggtggtggagggtgggaagagtcatgttttttttctcctctttgattttgtttttctgtctcccttccaacctgtccccttccccccaccaaaaaaagaaaaagacaaacacaaataaaatatctgagcggaactgtgcctttggcccaggctgcctctgtctgctttgtcctgccgcctagcctccccggtatgcccccaggctgaccctcggcccggctccatgacctcttcaccccatctccgttatctcagccccctcactcctccagcctcatgctctctgccttcatagcttcattgcaccatgaccaccaccggctctggggtctgggcccctgtagaacttcaccgaacttcttggtcccacagagcgcctgtttgcgggttccttccagaggtcttagtttccaggcccttggtctcctcatcccttgccttttctcccaaccatggctgcaggggaccaaattgctctcctgcatcaggcattaccctagtgggttgggggacggggctgcagaccctccacagtagggggtgctgagctgggggcaaccaggcggagtatgaaggctgtggcagcaggattgagtgtgggcctggagtgggagctgagtgtgtgaggggccgggctggaatgcggatctggtcagggtggtagctgctggccggttgaacttgtcaggccctttctggccacctcctttgcccctttctcctctgcggcccaaaatggggcagccccttcttacccatttctcagctcggtgcttctcctccttccctgccttcctccctgagctgctggacctgggacttcctgtgtctgtccttagtcgtgttgctttcttcatgggtgttttgtgtgactggttcttctcgcttgttctcgtgcacgttctcatatttgctcacgtgcttctgtctctaggtcacagtctctccctctttgcctggtcagagcttccaagatcctcagttccctgtccagtaactccgatgttctttctcgtgggtatcgcacccaactccgtgcacgtgctcttggaacctcttgtcttctctgcatctcttgcccatcgagaccttcctgatctctctcaacacgatcccacctctccatgtctgtctgtctgtatacagctccccccaccccctctgtctaacatgttttctgtttctctccctctccctgtctctgcttctgtctcctctcctcttctctctcttctccccatttcccctggttgttcctcctcttcctcttcctcctcttcctcctcctcttccccgctgcccccatctccccttgatccgtccactgcatagtctaaggagctgcagatcaagaagcagttccaggagacgtgtaagatccagactcggcagtacaaggctctgcgagcacacttgctggagaccacgcccaaagctcagcacaagagcctccttaagcggctcaaggaagagcagacccgcaagctggcgatcttggcggagcagtatgaccagtccatctcagagatgctcagctcacaggcggtgaggcctggggtccagggagggagtgcgctagaggccaggctctgtactttgctttagagaaatggacggtgcagggcatgcacagagctggggcttttttacttgggaaactcacatactctccctctgttcgtgttctccacaatgatttatttcatattctcctcagtggttttattctttctcttagtattttcttaaggtcttgacaaagccatgtgcctattcccaagaaccaccaaggaaaagagtggctattatttttttcctgggcctgagttagtttaatgggtaaacagggtgcagattaaagtgagtgtggccctcaagcccatttactcagacttctggaggattttgaaagttgctgttctaaaaaaatgatcacacctaacactggaatgggccacttaaaatgtgcggagagggtggagagtggaaacgccccacccaaggctgttctctcacccagtcccacctctcccaggtaacttgttaataattaactgtattttgtgttttttcagtgcacattttgaaaaattatatgaattttaaacacagatggaatcatactttacatttactttctgtaacttcttttttccacttaatatttcttggacatcttcccctgtcagtacacctgtctcattttttttacagcatagaattttccatggtatggctgtaccataatttatttaacccatcccttattggtggacatttaggttgtttccagtattttgctatcacaacgcttccgtgaacacctcgagcacatgtgcaagtatacctgggggatagattctgcagtgtaattgctgtgccacagggtatgaccatcttccattctgatagatgttgagaccgctgcttcttgaaaccttagggcccaggcctacctggggcaggggaggatagtgggggtgggggaggagatccctacaactggttgttcatcttccccagctgcggcttgatgagacccaggaggcagagttccaggcccttcggcagcagcttcaacaggagctggagctgctcaacgcttaccagagcaagatcaagatccgcacagagagccagcacgagagggagctgcgggagctggagcagagggtcgcgctgcggcgggcactgctggagcagcgggtaaggggcccagcctccaggactggggagggagggtgggctcctgcccccgactctaacctctgttccggatgccccaggtggaagaggagctgctggccctgcagacaggacgctccgagcgaatccgcagtctgcttgagcggcaggcccgtgagatcgaggccttcgatgcggaaagcatgaggctgggcttctccagcatggctctggggggcatcccggctgaagctgctgcccagggctatcctgctccaccccctgccccagcctggccctcccgtcccgttccccgttctggggcacactggagccatggccctcctccaccaggcatgccccctccagcctggcgtcagccgtctctgctggctcccccaggccccccaaactggctggggccccccacacaaagtgggacaccccgtggcggagccctgctgctgctaagaaacagcccccagcccctgcggcgggcagcctcggggggcagtggcagtgagaatgtgggcccccctgctgccgcggtgcccgggcccctgagccgcagcaccagtgtcgcttcccacatcctcaatggttcttcccacttctattcctgaggtgcagcggggaggagcagatgagctgggcagggcaggggtgggtggagcctgaccctggagggcactgagctggaggcccctgcaagggtaggggacaagatgtaggctccagctcccctcagacctcctcatctcatgagcttcttggggctggccagtggcccagggccagcttggcgataggtgcctcaaggctgcctgggagccccgcctccctaccatggtgccaggggtctccctccgccacctaggaaaggagggagatgtgcgtgtcaaatattcatctagtcccctgggggaggggaagggtgggtctagacatactatattcagagaactatactaccctcacagtgaggccctcagacctgccacagggcagagcaggtctggggcctgaggcagggagaatgagaggccaccttactggcaggaaggatcaggatggggtcttggggtcaggatgcctgggtctcttcccgtaactgtctgacgtcctgtgccgtcttgtcctttatctttttttttttttttttaattgggatcagggctggggcggggaaacaagggaaggaccttggaaggggctgctcccaggcctggggggcagtcgtgggagcccctctcagctgtggggctggcacagagccccaggcaagcttttaataaactgttggttattctaacag

SEQ ID NO: 46 - DNA, 6127 bp, Homo sapiens
agaagctgtcggactgtgagcgccttcgaactttggaggcttggctcgggatggaggtttttttagcatggggaccagggaggactacggtgctcgggactgggctgcggcctcctcgcggccccgagtgccctgtgaaatcagctcaggccgcgtccctctagcctgcactttccctctgttcacgctgcttccctccagggcccggcctccaagtgaaggggggcggagggcggtcacctgccagaaggtctggggcgccaaggtgtgtcccgggactcttggctccgtccaggttccaggccccgccccccagcttatccctagccggggctccccaccgtgggaacggggaccagctggccggaagcgccaaactgcgtccctgtccgagccctggggatcaatcaagccgaggagttaattatgtaatgagggggcagggggtcgaggctaatgaagcctcccggggtggggagggaggggaggaggggaccgtacccaggtatccgaccccctctcggaccccttcgaggccccaggggtctccaccccagcccaactccagggccccaaagaggggaggggctgtgatcctggatctggaaggggctgagctgtgagctataaagggggcatctcgcagcaccgggggccctaagcagcgagacctgaggccagacggaactacaacatgtaccatccacgagaattgtacccgtccctgggggccggctaccgcctggggcccgcccaacctggggccgactccagcttcccacccgccctagcggagggctaccgctaccccggtgagcgttgggaccagctcctgggtaggagaataggggggctgtggccctcggctggctcctcattcttccccggcttccagaactggacacccctaaactggattgcttcctctccgggatggaggctgctccccgcaccctggccgcgcacccacctctgccccttctgccccctgccatgggcactgagccggccccatcagctccagaggccctccattccctcccgggggtcagcctgagcctggagaaccgggagctatggaaggagttcagctctgtgggaacagaaatgatcatcaccaaagctgggaggtgaggggctggccagggtccgtgtttctggtgggggtctcttgggaaaggcagagtccctggggagggggctaggactgggtggttcccgaggggctagagctctgcctaggcctagaatctgactatggcctggggcaagggttactctgtggcaggaatcaggagtcactctgtgacaagggttaagggccagtctgtggagtctgtggctgagtttagggaccaatctatggcaagggtcatgggtcagtctggggcagggtcaggaagtccctctgggttataggttagtgtgtggcttagaccagcatccagacaaggacagggggtcaagggccagcccattgaccagcatcagggaaatctggccaggattcgggatcagtatgcaactcgaataggagtcagtatatgactaggtccagggtcaccctagaggcagggacacggtcagtgtttgaccttagatgaggtctttagctggggcaggaactcaagccctagcatggaaagtcctcggccctactgcaggcagggtatattttttctaaagcaaattcatctaagagctgcagattctggtgctggagatcaggggaggagaggagggtggggacaggaagctcctagcaagaaagttagtcacccctgcttctgcaaataggctttgaggggtaggagtcatggctctgttcctaacctgctgtgtgacagatcacttaacccgtctgtcctgtttccccaaatgtaaaatgagacaagaaaaccttccagctctaagattccgccctctggcttctttttttttttttttttttttttgagatggagtctcgctctgttgcccaggctagagtgtagtggcacgatctcgtcagctcaccgcaacctctgcttcctggattcaagcgattctcctgcctcagcctcccgagtagctgggactataggcacacaccaccacacccggctaatttttgtagttttagtagagacggtgtttcaccatattggccaggctggtctcaaacttctgacctcatgatccttccacctcggcttcctaaagtgctgagattacaggcatgagccactgcgcctggccctttttcatttttcagagacagtgtcttgccctgttgcccaggctggagtgcagtggtgcaattgtggctcactgtagtcttgacttcccaggctcaagtgaccctcccgcctcagcctctgtagtaactgggactatcagtgtgcaccaccatgcctggctaattttttaatttttttgtagagatggggtctttctatgttgcccaggctggtcttgaattcctgactcaagagatcctcccaccttggcctcccaaagtatagggattagaggtgtgagccacagcctccagcctgccctctgggttctaattccacctcctttgatgtttctctgacagctctggggagcccgttgttatgtcccgttactggtgctgggcccacccctggccagtgggtagctccaggcctctcctgtcccctcccttgcacaggcgcatgttccctgcctgccgagtgtcagtcactggcctggaccccgaggcccgctacttgtttcttctggatgtgattccggtggatggggctcgctaccgctggcagggccggcgctgggagcccagcggcaaggcagagccccgcctgcctgaccgtgtctacattcaccccgactctcctgccactggtgcacattggatgcggcagcctgtgtctttccatcgtgtcaagctcaccaacagcacgctggacccccacggccacgtgaggcccaggctgggactccaggatagggttggggggtgctggaagggaggccaagggtgaggcgcagggcagggaatcactcccatttcctccctcccagctgatcctgcactccatgcacaagtaccaaccccgcatacacctagttcgggcagcccagctctgcagccagcactgggggggcatggcctccttccgcttccccgagaccacattcatctccgtgacagcctaccagaacccacaggtgagtgaccctgcttgagggggtggtggccccctgcccagaccgcagttgctttgaccctgcatgtgtgtccccagatcacacaactgaagattgcagccaatccctttgccaaaggcttccgggagaacggcagaaactgtaagaggtgggagttgttcattcatttgttcatgcattcaacaaatgtttattaatcactcactgtgtgccaggcaccgtgctggacatcagaaatgcagtggtaagtgaaaacattcattcactgactcagcaaatacttatatagtacctgctatgtgccagggacagttccaggcactggagataaaacaaacaaagcaaaccaaagccccggccctcatgcagctgatttctagtggggagagtagacaagcagacaagagaaataaataaaatgtcatctgttaggaagccattctaaagagaagagagaccaggtgtggtggctcacgcatgtaatcccagcactctgggaggctgaggcgggcagatcacctgaggccaggagttcgagaccagcctgccaacatggtgaaaccctgtctctgctaaaaatacaaaaattagccaggcatggtggcaaacgcctgtaatcccaactacttgggaggctgaggcaggagaatctcttgaacccaggaggtggaggttgcagtgagtcgagatcatgccattgcattccagcctaggcaacacgagcaaaacttcctctcaaaaaaaaaaaaaaaaagaaagaaaagaaaactctgtctcaaaaaaaaaaaaaaaaagaaaaaaaagaaaaaggagaagagaaataaaccaggaaaagataggaaggactggggtgaggtattagataagaggcctggaaaggcctcagtgggaagaagacacttgagaaagagctgaaggaagtacgggagggagccaggtgggcatctggcaaagcacactagggagtgggaacagcacgtgcaaaggccctgaggtggggctgtgcctgtggcgtggctgcagtggagtgactaagagtcaggcaggggaggggaagccaggttatgtcggacagtaaaggttccgtaaggccgtgggaactgttccaagtgcagcacctcagagctggcccctgccctcaagtagcttccagtttgtcagaagagacagacatgaaccaaggagtcactccatcaaatgcaaaagcagaactgtgacggatgttatgagggaggggtgtgtgctctcggaggtcagggaggacttccttgaggaacttgcgcttgcagtgaggcaaggataggtttggtggctcatgcctgtagtcccagcactttcggaggctgagatggaaagatcacttgagcccaggagttggaggctgcagtgagctgtgacctgtgactgtgccactgcactccagcctgggcaacatagcaagaccccatctcaaattttaaaaatgaaaagaaaaaggacaggttcagcccgtgaagaggggacagaagaggattccagagagaggctgagagtggagatggggcagaaagatgagctaggtgagactgtgccctggccttgccactgggaaggagtttccactgatactaaacacaataggaaagcatggacaaatttgagcagggacaaaattccagctctgccactttctagttatttaattttctggccttcagtttcttcatctataaaatgggtataatgatggcccctacctgacagggtccctgggagggtgaaatgcctggcaccgggtaagtactgttaccatcaccatggccatcaccatcatcatcatcatcaccaccactgttccccagggagcgagacgcccgtgtgaagaggaaactgcggggcccagagccagcagccacagaggcctatgggagcggaggtgagtgtagtcccgatggcgatggggccaggcctgagacagggatcctccctagcccaacctctcccttccctctccccagacacaccaggtggtccctgcgactccaccctgggtggagacattcgtgaatcagatccagaacaggccccagcccccggggaagccaccgctgccccggcacctctgtgtggtggccccagtgctgaggcctacctcctgcaccctgcggctttccatggggcccccagtcaccttcccaccaggtgagtgggacaggggaccaggcggggctgcgggtccctctgccctgctctgacatccctctctccatgtcaggagccccagcttcccggaggctccagactccgggcgctcagccccctactcggctgcatttctggagctgccgcacgggtcagggggctccgggtacccagcggctccaccggcggtaccctttgccccgcactttctccaagggggccccttccctctaccatacaccgcgcctgggggctatctggatgtgggctccaaacccatgtactgaaccactgctgggcccctctgcctccatcacaaacctcccgctcccttcccccagccctggagccccctcacctccaccggccccatcccccacaccaaatggccgccttgggcctgcccacccaccccctcaacttcacaccttgatttcactcccacccccctctggcttcaaagcctaaccaaggctgctgggagtccagctggggccggcttccccttcccggctctcacctccgtgtgaatggaaggggctctgcctggccaaatggggccacagaccagcatccccacttaccaggcctccccatgggctctggaggggctcaatccccacccccccacacacactggtgcaggccacaccagtctgttgttctgggaccagagtatttttgttaataaaactcaaaagccatccatgctcaggaaacattgggctcctgtgtttggccctgggcgggg

SEQ ID NO: 47 - DNA, 39180 bp, Homo sapiens
acagggcaccgagggaaggaggacgcgagggcagccaggccctagggagcagggagagtggctcgggctcagtcgcgtggccccaggtgcgcgtcccaggtgcgcggccttgacccagcagcgtccgccgtgctggccggggcctcggctccgcagcagaagccgcggtggtggcagccggcgcgggcgcagctgcccgcggctggggcgtttcatctgcgccggcctatggtgcgggcatcgccctgggccacgcgctgatcgtctccatctcactcagaaaaagttactcatacagtggtcttgtaaagggtctgaagtggtcaaattgtccctttttagaaacggatagttttaggtcttaaagatgtcctagaaattacccttacaagcccagctctgtcattttatagtaagggacactaagatcgcgtacagagcttgtcggaggggcttggtcttctgtctcacgctcagggttgtctcctcgttacaggagaccttgctcttaaacgtttcagagttcgcttttccccttgctgaattcataaaaatgtttttaatttatatgtgtttcttcttgtaggaagaagaaattgtcgagacgaataacatgaggtcatatagaatcccacttttggtgatttcaagtcaagaaagtaaaagtaaaccattgctatctttcaccttaaatatcctgtgttttattgctcagaacatccagtttttctaatactcatgatgtcagaagggaaacctcctgacaaaaaaaggcctcgtagaagcttatcaatcagcaagaataagaaaaaagcatctaattctattatttcgtgttttaacaatgcaccacctgctaaacttgcctgccccgtttgcagtaaaatggtgcctagatatgacttaaaccggcaccttgatgaaatgtgtgctaacaatgacttcgttcaagtggatccagggcaggttggcttaataaattcaaatgtgtctatggtagatttaaccagtgttaccttagaagatgtaacacctaagaagtcaccaccaccaaagacaaatttaacccctggccaaagtgattcagcaaaaagggaagtaaagcagaagatcagtccctactttaaaagtaatgatgtggtgtgcaaaaatcaagatgagctgagaaatcgtagtgtgaaagtcatttgtttgggaagcctagcatctaaattgtccagaaaatacgtaaaggctaaaaaatcaatagataaggatgaagaatttgccggttctagtccacagagttccaaatccacagttgttaagagcctgattgataactcttcagaaattgaggacgaggatcaaattttggagaacagttctcaaaaagaaaacgtgtttaaatgtgattctctaaaggaagagtgcattcctgaacatatggtaagaggaagtaaaataatggaagccgaaagccaaaaggctacccgggaatgtgagaaatcagccctcacccctggattctcagataatgcgatcatgttattctcaccagatttcactcttaggaatacattaaagtctacttcagaagacagtcttgtaaagcaagagtgtatcaaagaagtggttgaaaaacgtgaggcatgtcattgtgaagaagtaaaaatgactgttgcttcagaagctaaaatacagctgtcagattcagaggcaaaatctcatagttctgcagatgatgcttctgcatggagtaacatccaagaggctcctctgcaggatgacagttgcttaaacaatgatatccctcacagcattcctttggagcaggggtcaagctgcaatggtcctggtcaaacaaccggtcatccttactaccttcggagtttccttgtggtgctgaaaaccgtacttgagaatgaagatgatatgttgctctttgatgagcaggagaagggaattgtaactaaattttatcagttatcaggtatcttacgcacgtgtttgttttcaagttttcattccccttttgctgctctgattggggcatgatgtgatgggcagtaatctagtgaccgcaaggagtcactgtggtgttgtgagcaccctgtgggagtgttcatgggagttggagcatagtcgaaggttttattgagagggatgcatggaaaagagacaagattttgtcccgggtgatgtttactcctgctgaactttggttacattggaagcagctgtttttcttttataggtacatttgatagttatgaaacaaccttttccagattaaaaaacaatataatgtgacttagaaaagcatactttgcattttgagcgtgtaatcaggctttccattaggttgttttgttgttcctcaaagatgaaagtagaataaaatacaatacaggaagaaaacaaaccaacctgaggcatattttctttctcccaacaacattttagatttatggactgtgccttttaaagacagggtgtggaggaaatggaaactttcaagctgaaattggtacattaaaaatactagtctatgcctgaagtccttggcagccaggggtggctccaagccagcagtgcaggtttgtagtaaaagccacccttgtgtctttacggtgttattcagagggccatgatgactctgtggaaccatgtccctgagggcaggaaaaaacatggtagtcacactgtcgtttagtaaaatgcggccatgtgtgactcctcagtagataaaaaagagaaaaatcctgaacattactattgatgttcaagggaaggatttctattttaaattcgcacagtgaaattatggtattccttgggttactttttaacatgtgagcgatacttctctgggcacagctgtgtgtagtatccacttccatctctacttttgctgttctcaccagaagatggacataatagcacattggcttttctatccaaactagtcacagatctttggttgggtgctgattgcattcctggagtatttcagagattggtggctctgtaattccatgtaattgagaaataggaacagttttcctagtgcaagttctgcatatgcatgtgtcttgcactccatggagaatcatgtacaatctgttggtgtgtagaaataattactgctaattgtttttgcctttttttttttttaattttaagttcttttagagacaaggtttctgtctgttgcccaggctggagtgcagtggtgtaatcatagctcactgtgaccttgaactcttggtcccaagcgatcctcctgcctcagcctcccaaagcactgggattacaagcataagccataggctgggcatggtggctcaggcctgtaatcccagcactttgggaggcccaggtgggcagatggcctgaggtcatgagttccagactagcctgaccaacatggtgaaaccccgtctctactaaaaatacaaaaattagccgggcatggtggtgggcgcctgtaatcccagctgctctggaggctgaggcaggagaatggcatgaacccaggaggcagagctttcagtgagccgagactgcaccattgcactccagcctgggcaacaagagcaaaactccatctcaaaaaaaacaaaacaaaaacaaaacaaaaaaacaaccaaaaaaaacaacaccagcatgaaccatcatgacaggtcaattttgcctttttaaagaagaaaggaaaataaatgttggaaattttcaaaatacaattaagccattttagagttggccgaaatttaaagataatctgggtaatagggagattgagaccaaacaggttaattaagaagcttggtcaagattgctgggttagagatgactgccctactgaagctagacattttttttggaaaattatttcagattattttcgatcaaatcagaataatgcatattaagctaagagcagagaacaaaataagaattctgggtagggcttttctgagggagtagaaatgttgatgtctagaaaatggggaacttgatcttagaagttttaaaatgaccaataattgttaccaaatttttaaatgtactttcaaaatggtttattccataaaatgaaggccttatacatacagtaagcatatgtgtatttctaaatcgtacatttattcaccttaggtttaaaaggtaaatgcagtgattttcaacatttttcttaactttattgcagctactggtcagaagttatatgtaaggctctttcaacgtaaattaagctggattaagatgaccaaattagagtatgaagagattgccttagacttaacacctgtgattgaagaattgacgaatgcaggctttctacagacaggtatgactagtagaaggagatgtgaaatgaaaatatgatctgaagaactgagcttctgcagaatgatggcagtattattatggtgccctccccggggtggtgcctggtaacttactgttttttaattgaatttttaatcttaggacaacaaattactcatgtgatgctaaagccattcttagcctgagttaagaatactagaataatgagagatggtctgctgctgttttcttgactgtggcaggtttagaatgaaagtcacctgggcatagacatgggtgtgtgccacagaagaaatacatcccggccgggcacggtggctcatgcctgtaatcccagcactttgggaggccgaggcaggtggatcacctgaggttgggggttcgagaccagcctgaccaacatggagaaaccccatctctactaaaaatacaaaattaggtgtggtggcgcatgcctgtaatcccagctatttgggaggctgaggcaggagaatcacttgaacccgggaggctgaggttgcggtgagctgagattgcaccattgcatttcagcctgggcaaccagagtgaaactctgtctcaaaaaaaatggatacatcccttcttggcgctctccttccagcaagagcttgactcatcttactcagagtcctcttctttatgatagaataaagctggttgtttgaaacccatattgcctctaaaaacttcatctgccccccttgcacacacatacagttcttcgattatgttgattgccttaagcattgttgaattgctttaagcctatgtgaacactaaggagagtctatcttctgcagtgatacccttcgttgtcttgtcagtagcattcgttaagtacctacctatgtattgggtacaaaattgtactgtattaggaaagggaaatgtgagccttgggttcaagttgctgacattttagaccaaaataagcgaatcagccagctggtttctttggggcagagtttattgtggggagcagtaagtggggatgaagcgaagtgagcaggaagtgtgttagggtggggctggatggcgtgggatggggaaagttgcgggagaggcataaaagctcagtgaaggcgcttggttgtgaatggttagtggtgggacacaggaccctctgcagagcagcgcttcccacacatcagtgccagcagggtcacctgggaacttgatactcagtccccacctgacttggaaaatgtggtgcagcttccgtaaattcatatgtctgacaggcatgccaggtgactgctgcaggtgagccttgacttaccttcaaatgagcaacaaaaccaggatcctagtggctcaccgtggcactcagtcaagtgcaagtcccatccatgctccagccccatggggcctggctctggctgtccctctcgctttctgccacggccacccagccctcagtgttcttcaccaggatgagtgcattcctgtctcagagccttggactgactttcccctccacccaggtcagtttccaccacgtggccacacggcatagttctcctttccttccccgctgcgtggtgttaccttgtcaaaggtttgcctgactactgtgtgaaatacagccagcctcctgccagcttcagtttgcctcctgagttgtgtttttctttagagcggttattaccacctgataaatttgcctattcatttaattgttacgctgggaggctagctcctatggatgggatttctttcactgtagcatgcccggggccttagaacattaccaggccgacagtgtacacccaataaatatttgctgaatggaggaagaaggcactgccctaaacttgtgaagccttgaaggcaaagaccagcgaggtctgactgagccgaattcctaggccaaggttggtgtcggggcccacagtagccgaacaggctcacgaatgccgagtgagcaggagaggcttgtgggaagaagagggctgatgatcagttctctctgacctggtttgagaggtcccattttgtaggggttttgtgacgagaaaggcagggagtatatattccaagcaggtgttgagatgcccaaaccataatggctatccatgtgtgtctttattttagttatgttttcctttagattttagtgagaaattctattatttgataacttttaagagatataataatagtgttattaatacgttaataataccatgttaataattccacatttaatgattggtttggccaactaattaaaattttcttagtagcatttcattttattttcatctaactaaggtaaataaagctagaaaatagtaaaatttaaaaaaacttttttttttaaccatttcagaatctgagttgcaagaactctctgaagtgcttgaactcctttctgctcctgaactaaaatccctagccaagaccttccacttggtgaatcccaatggacagaaacagcagctggtggacgcctttctcaaattggccaaacagcgttcagtctgcacttggggcaagaataagcctggaattggtgcagtgattttaaaaaggttttgttggctattgttacagtaaaaacatttaaaatgttgatagcacatattaacttacagtagattgtatacttgattgaactgtaattgtttatttcagttgtagttagattgagaaggctggaaaagccttaattgcaatagcctggattctttcttgggttattattcaaaatttttgtcgtaataccgtactaatttccaggaccaagaaaaatcggaaggcaataggcctttggtaaattgtagtattttattttccgagaaaaatacagttttaagtgattcttatgggattttaaggtaaactatttagtcaaatttttattttagtttttgtttactaaacaaagtataatcaggcagtcttaatgtgcaagttttcctgagtttaaacgtaacaatttaccaaaaactgtgagtggcttcttttgtccttgagaagcccttgacctgtttcagttgaaaattacaaaaacttttagaattgatttcttttgcccatgttatttatataatcaaactatatcaactctagcctgggaattcactactgtggagtcgaggatgaaatgagaggatgcttttgaaaacactttaacatgatgttgttatttattttatatatttgttttgtatatttcagttgttatgagcccatccttgttggggaggtgctataaatactaatctttaatgaaacataggtgtaataaggcagacattaagaaaaatataaataccaacacttgaaaaaagctcgtgttatagatttttaaaaagtacttcaataaattacatacttgtaattaattgacttgagaagtatagaatcctcatctgtgtggtatgttaaatgtcttctaagtcctttctttatctaattgtatttcttaagtatttgatgttaaccttatatgtaacattttataagcaagtaaacattaaatttagccaccctctggctgggcacagtggctcacacctgtaatcccagcactttgggaggctgaggcaggtggatcacaagatcaggagttcgagaccagcctggccaatatggtaaaaccctgtctctactaaaaatacaaaaattagcctggtgtggtggcaggtgcctgtaatcccagctacttgggaggctgagtcaggagaattgcctgaacctgggaggtagaggttgcagtgagctgagatcgcgccactgcacaccagcctgggtgacagagtgagactccatctcaaaaaaaaaaaaaaaaatagcagccctttcttggtatatgcacttagcatagaacagataaagtaaataagatgaacatattttatctctaactttggacttgtaggaaaatagaatcctcaaggctgttttagttctagtgaaaaccactgtcctttaaggttgtcctttatttcttcattctgatggtaaagcccagcagtggaatttcagagtccctgccagccccacgctagggcagcgcctggtgcttttactctgctgttatgataaagaaacagaaacagccacattattacagaaaaaggcacattatttatgctttcttaatccttgcaggagtcactgcttagttttctgtgtttaatgcttccttttgcagactggaggctgtgtccactggggcatccccgggactctgcgtggaggtggatgaaatgggtactttggggcagtctgtagatgagtggctctcagttcagtggtggtgtgataggaatcccaccccttccccttcaactccatgatggtggcactcatctctcccacaccctctgggatgcagtgctgcttttggtttaatagcttctgcaccagaagggtgtgacatctttcactagccaagtggttctcaactgggggcatctggcatcatctggagacatttttggttgtcagtactggaggtggtgaagctaatggcatctagtgactagaggccagggacagggcactgctgagcatcctataatttacaggacagcccctgacaacaaagaattacctagcctaaatgtcaatagtgctgaagctgaaaaaccctgctattgatggtgtctaagctgctagagtcagagggcccacatggtcctggatttaatttagacctccaagcccaccttgcagacatccagagttgaactgaattcactccaatgttatcctagaatagagatgctgctggaccattctgtacactagagaaggggtctgcaacccccaggccatagaccgataactgtccattgcctgttaggaactgggccacacagcagaaggtgagcagtgtgccagagagcatgaccgcctgagctttgcctcctgtcagatcagcagtggcattagattctcataggagtgtgaaccctattgtgaactgcgcatgcgagggatctaggttgcgtattccttatgagaatctattgcctgatgatatgaagtggaacagtttcatcccgaaacacctccctcaaccccagtccatggaaaaattctcttccatgaaaccactccttggtgccaaaagcgttgactgctgcgctagagaacagcaccaaactttggcatatacatttgcaccacgtcttggtacacaaaatctgatgttttacctggagcctttgataatgacattttaaagaaataccattatttaatctaaatcatcactagaataaaaaattgagaattgcttcatgttgactaggcaatacttttctgaaagttttcctggtatttgaagcactcatgaccagggtaaaccccaacctactgtgcagccgaggaaggaagcacttgtatggagccaaaccatgtgtggaaccatttggagatgtacattcatttactcctgtgtatccctgggtgagctctcagccccagagcagttaagtaatgctccagtgtttaaaatagtgaatgtcatttctctttattttagatgaaaataatttgtaaaatctgacatccaaatgcttaaaaagctaaaagttatttctacattgtacatttttcagagccaaagccttggctggacagtcagtacgaatctgtaaaggccccagggctgtgttttcccgcatcttgctactgttttcgttgaccgactcaatggaagatgaagacgccgcttgtggaggtcagggacagctttcaacagtcctgttggtcaacctcggccgaatggagtttcctagttacaccatcaatcggaaaacccacatcttccaagacagagatgatcttatcaggtaagatgatgttagctcactataatgtctatatgtgtatttcacaatttagtaaaaggttttgttatttttttccagccaaagtagaaacattaagtccacagccaaaacagtttttaatctttttttgccccacttgtatacatttctatgactatagggaaaatgtagaagtgtgctgagattatggttgccaaaatccaaggaattttgagttagaactacaaaaacttctctggtttatgtttccaagtacctttggaagggagtattttttgtttgtttgtttgtcttaatttgagacaggatttcgcccaggctggagtgcggtggcatgatcaccgctcactgtagcctcaacctcctgggcccaagtgatcctcccacctcagcctcccaagtagctgggaccacaggcacatgccaccacactcagctaatttttgtatttttttggtagagatggggtttcaccatgttgcccaggctggtctcaactcccggactcaagcaatccgcccaccttggcctcccaaagtgctgggattataggcgtgaaccaccgccctcggcctgtattttttttgacacagacatattaacaaacttgacttaggaatatgttgttggcatgaacaagactgaatgtgaatattttcttattagtaacactttaggtaaagctattaataacttgtatattgtatatcatacatatgataattagatatacagatgataaattagaaattttcactaatttatattggcacacggatttagtgaaaatttggtttgtccaataaaagtagattttgaactaaaagtagaactaccatgtgatccagcaatcccactactgggtaatatccaaaggaaaagaaataggtatattgaagagatatttgtactcccatgtctattgcagtctattcacaatagccaagatagggagtcaacctaagtgtccatcagtggatgaatggataaagaaaatgtggtacatatacacaatggagtactgttcagccataaaaaagaatgaaattctccatggtggcaacatggctgagctcagaggacattatgttatgtgaaataagccaggcacagaaagacaaatactgcatgttctcactcatatgtgggaggtaaaaaagtggatctcacagaagtagagagtagaatagtggttaccagaggctgggaggggaagggggatagggaaaggttggttaacagatacaaaagtgcagctaggtagaaggaataagttctgttgttctgtagcagtgtaggatgactataattaacaacagtttattatatatttttaaatagaagaatggatttagaatattccccacacaaagaaatgataaatgtttgaggtgatgcctggtatggcaacacatgcctatatttctaactactcgggaggctggggcaggagggtcacttgagtccagaaattcgggactagcctgggcaacataatgagaccccatctctaaaacattttcaaaaaagtttgaggtgctggatatgctaattaccctaatttgatcattatacattgtatacatgcattgaaatatcacactgtgccacataaatatgtgcaattttatgttaattaaaaataataatagatgccaaacaaataatgggattacagtattaaaaagcaggttttgataagaaagaatagtgtaggtcttaggaaaaaaaatttggatttccttaaaaaaaacacctttggtaagaaaaattaatttggatttcctaaaatgtcacttttgattcttgatttggatttctgactcaaatttaaccaaaattgattgtgatatttgcttttaggaaagtcctgtgtttctaggaaagccaggtgctttaagaagtaagttattgaaatttttgaatcacagcagtgtcagtataatctgattttggcccattttaccttagctgtcaggaagctcagtatcttatttgtgttcaatgggaataacttttttagttaaaatctctaataagactgtttattcttaccctgttttcagttgtctcatatcttttttaccttttttgtttttactggctttacgcttttctggcttgtgagaatgtatactctgaagccaagttccagtttctataccaatgaactgtgaacccaccctgtgcctcagtttcctcatctgtcaaatggggagaataatagtatattcttacagacatgtgtggggtgcatgggaagtgcttaaagcctgggctatggggaatgcctactacatgttcattattattttaattgtcattcttactgttatacccaagttctatgacaaaaccatggttgacaagttcaaaaggcatctcatattctttctagaaagtaagtgtgctgtaaataataaaaataatgagaactcccttggttaagcagagagccttaagatgtaaatgaaactggatttaattgacttctggaaaggtaatagtattcaatatctggtaatgtgatacctggccaggaaacccttgttgtctacctctgtacttgagataatttatccttttaaaatgtttcttattcattcagtacaaatgagtgttgagtaccttttatgtgacttggttaggggttgtagcagtgaacaagagagggcctcagccatcatggggctatgtttcctggggagatagaaattaaccactatttaaagtgtgtgagaagtgctgtgataattgagggacaggctggataagttctttatagacagagtggccctggagaggtgacatttgaagtgggacttgaggatgagaatgaggtagctgtgtcagggtctgggtgcctgcgtcccggccgcgagatagcatgtgcacaggccctgaggcaggaaagagcttgctgagttggaggaactcaggagacccctggctaagatgtgggggtggacaggactgggttgttggtagcggcagtggagagaagtgaatgtgtatgaggcagtttggaagcagtaaagacaagacttgattctgatgtgggcgagaaggtgaggagtggatcaaggatggctctggtgttttgccttggggtggggcgccatccagtgaaggggattgggagaggtgttggtgctggaggcgtcagtgtgtggggtgctcttcagccgtttggttgaagctgttgtgtgtggcattggacttgcggtcaggagctcagggaatgggtctggcctggaaaaagtcaacattttgagagtcactggcatatggacaatgtttgaagccatggaactgaatgagcagcatattataaaagaatgagatctaagaatttgtgagcaaacttttacatttggaggcaatttctttactcttactttacagtgtttgtacataatgatattatgtacttcatgcttttcttttagatgtgagaccaaaatacaatgaacatgtactcaaagtgttaacagaatttgttggtcaaatgtctttgttttttggtagctaaaggagcgatgaaaaattgtctttcttaagctaagttgtgttgtaacatttcagcgttgccatctcccaaagagcatcccttagttattttgaaatattccaggtaatcttcttagcttgggcagcatccctctggctagctctgattgtaaatgattaaattatcagatctacatctgactataattctgatgtcacttacatgtttgctgtcatattgttgaatgagtgaatggatgaatgaatggatgagtgccaaaatcaggaatgatgagctgatccatatcacatttatagaatggaacatgttatgtgataatacagcataaatgtttttatctttctagttgggctttcttatcagttctgggccactccagtgatttggttaagataaattattattagaataaaatttaagtggccctcatattttaaaaaacacacttttacctttcagagtgagatctagtggctaggatgtggtcattctatgggaatgctcattcttatttggaacttggatggcattttcctccagatatgcagcagccacgcacatgctgagtgacatttcttccgcaatggccaatgggaactgggaagaagctaaggagctcgctcagtgtgcaaaaagggattggaacagactgaaaaaccacccttctctgaggtgagagtttttctaggtacctgccaaaatttatacattgaccaagttgttcccaacacttacagtaattttcttcatgaagaatatactcctttttctctgtggttaaaccagctgtggaattgaattttgtgcgtgctttgcctagaatgaaagtgctgtgtgaaatagaaggaaatgtctgaaggtttaaagtgaatttgatataactcagatccctgggcaacacacatgccaaccccatacttgacttgtcgcatgccaactgtaggagtgttggcctccctgagtactggtgagctgaactgaaacgtgagggaagccagcagcaggacggatgtgggaagcatggtaggtgggttcctctgagggaaattcaagtaggtgttaaaaactctgcaaaagacagctcaagcgaactttccaggtacacagcacatgatcttttattttgttgaaaatggtaaacatcttcaatatttattaagacattttttcctttgttgttacatagtgatgagaaaaattagtattttcagatgccactttgaaaaaatcatttaggatatacagttgacccttgaatgatgcaggggttggggtaccgacccctcagacagtcaagaatctgtgtgtaacatctgacttccccactacttaattaatagcttactgttgactggaagccctaccgattacatagtcaattaacacacattggatatgttatatgcattatatgctgtattcttacaataaagtaagctagggaaaagaatatgttattaaggaaaatcataagggggctggtacggtggctcacgcctgtaatcccggcactttgggaggccgaggctggcagatcacctgaggtcgggagtctgagaccagcctgaccaacatggagaaacctcgtctctactaaaaatacaaaattagccaggcctggtggtgcctgcctgtaatcccagctactcgggaggctgaggcaggagaatcacttgaacccaggaggtggaggttgtggtgagctgagatcacgccattgcactccagcctgggccacgagcaaaactccgtctcaaaaaaaaaaaaaaaaaaaaaatcataaggggctgggcgtggtggctcatgcctgtaatcccagcactttgggaggcagaggtgagtggatcacttgaggtcaggagttcgagactagcctggccaacatggtgaaacctcgtctctactaaaaatacaaaaattaggtgggtgttgtgacgagtgtctgtaatcccagcctcggaaggctgaggcaggagaatcacatgaacctgggagacagaggttgtaatgagctgagatcgcaccactgtactccagcctgggtgacagagcgagactctgtctcggggaaaaaaaaaaaaaaaaagaaaatcataaggaagagaaaacatatttactgttcgttaagtggaagtggatcatcatgaaggtcttcatccttgttgtctttacagcaaataggctgaggacgaggagagagaggagggcttggtcttgctgtctcaggggtggcagaagcagaagaaaatccacatataagtggacgtgtgcagtttaaacccatgttgtccaggggtcagctgtatatttatagagaaataatattgacttaaaaatcacaagaagttagattactataaacagaggttgataaacttctgtaaaaggtcacatagtgaatattttaggctttgcaggccatatggtttctgtggcaccaactttactctgctgttttagtgcaaaagcagccacaagaagtacgtatgcaaatgaatgagcctggctgtgttccagttaacttcatttgtggacattgaaatttcagtttcatacaattttcgcataccaaagtgtattattctctttatttattaacaatttaaaaacataaaaaccattcttagtttgcaggacatagaaaatcaggtggcagaccctgggtttggctgtgggccggagtttgctgaccttggtttagaatgatgagttctcatcttactccactgtctgagtgacctaggacgtggtagctggctgtgagaatgtaggtttgtggtgtagaaaattgtacacaactgaaagtatttagaatatacctttttaaaagataggaattcagtctgctttgtcacttgttattattgtcttataataaattaaccaaattattaaactactggtatatgtcttcattttagatgccacgaagatttaccactcttcctgcggtgtttcactgttgggtggatttatacaaggattttgtctcggtttgtggaaatactgcagagacttcacatgtatgaggttagagcacaggtccctgccccccaccattactgatgtgatggcgttaaacatgtgaagggacagctgtcgggctctcagcatttcctgcttatttggttagcacacagtaatataatggaggcatatttgttttgttttgtctttttgagacagggtctcactccatcacctaggctggggtgcagtggcagggttcagcttactgcagcctctgcctcccgggctcaagtcatcctctcacctcagcctcctgagtagctgggactacaggcgtgcgccaccatgcctagctaatttttgtatttttagtagaggtgagatttcaccatgttgctcaggctgatctcgaactcctgggctcaagtgatttgcccaccttggcctctgatgctttgacagtgggggcctaaagtgttgggattacaggtgtgagccactgtgcctggccaacgagggcatagttaatgtaggcagcccgctgtctcttggattagtagagagaagataggtgaagatggacagctgttctgtttgcctgtgtgttgatgaatctgtgtcccaggatggcctgggggtggcggccaccatcctggagggtgccccacaggtctgcagcctgagcctgagtctctttcagaactccttgtgagacttggcaggtccccagaaatctctgagggaccttttgcttccttttgcttccctgtcagctgtcatggattgtctggagacaatttataatcacaaatcagaaatttgtcgtatcctaaactttgtgaaattgctagatttcacttttgttgtgtttgatatttctatattgaaaatgttatctccagaccaggcatggtcaaaaatatatatatacaaaacaagaagaaaagaaaatgggatcttacaaagaggatgtgctaagctggtttcttggcctggggtctgtgaatcccaggggagtgatgggtgggctttggggaaatctgtgaatctcaaacttgcatgtgtatggggatttatgcatttttctggggtaaatcattccatattacaaagacatccatgagccacagaagattaacaaacagaatgaccgaacagtctgtacataatctagaccagagaatgttcctgttgaggtagggtgtttgtatgaggacacccctcattactttcctgcccaccccaaatccctcttgcagttggtcctgtgacctgctgtgttcccagaagtatgtgggtttgccaactgtgaccagtgctcagctgcctggaacttgaccctgtgcgactctgcactggttgactggtttgcagataacactctgcagcactcacagatgtctgtaccccagtgccagctggcagggaccgggtgaagagtgaggatgccttagggaactcatgcccactccagaaggcacctcaaagtccctgtcctgtcagttcggggtccttggcctcattgtagaatggaaagatacgcattataaataggctttaccaatcctatgggcttgtaaatatcattgcagctggattttttgtgaatctaatgaggtttctttgttattgttgcaataggaagccgtcagagaacttgaaagccttttgtctcagagaatttattgtcctgacagcagaggccgatggtgggatcgactggcccttaatttacaccagcacttgaagcgcctggaaccggtactcagtaacaaaacatatctgaaacaccttttcattttagaatcaacttttaaaatatggcaaacttaatgccttaaaatttacatgtaattagaacatgtatttcttttgttaacattcttcttttgtctgtgttcttccaaccccaaaagaataccagggatgccagcacagcatgagcatagagactggaagcttttgtcttctctttgctgattggcgagatgggcttactgtggactctgtgctggcatttaggaatcaggatctaggaattaagggaaagggagagtcagatgactcagccgtcagcaagtcagcaagtgccttcaaggaaggtgtttgttttggaaatggtgactttgttgatttgtagcacagggtctctaggtagaaagattggcgagaaagcgttcctttccctatcttattgcaggtcctttatgcgtgactctgtacttctgtgaggtgttttgctctgccatttggaagcgttgtttgaccttgagcaggcaccagtgctccctgtggtggcgatctaggggcacttggaagcacagggattctgtggccaccacagccaggcgggtgaggccgcagagcctgtgcctgtgggctaggcagcaacagtggttctttgtgtggccgccagcaggcccctccctgtctctattccagccctgcatttgagttgaatggaggggactgtgcctctgggagcttttgattttttcagtggcccattaagtgaatcagggtgatgtaggggtggaaaaaaacgaccactggttaggaaatatgacatcttgtttttattgccgtaaactgaaaaagtgccttgttacctcacgtatcagggaaagagccagtaaagctatttcctctcatggaggagggtgtggggcttccttaccactcggtgtttactgaggctgaaatagcaagagaaagcatctggtagcctagaaccaaatacagaaggagaaagcttgtgtttctgtcgcctttctttcaatgaaataaaagttcaagagagtacagatttcccctctgttcacagttctgctagggggtagacaagccactgagcttatttttgagatttgagctaagcctagttcctcctaacctctgtttccagaggtcttactggccatagctcttgttatttcattagtgttctttgatctttacctcagtctccagggaagggatcgcctagctgagtgctaattcctgcaaagtgctctgcagccagccccggcctggccagggcagaggtggagccagctgggccctccctctccgaggccaggctgccgctgcccggcaccgtcttctgccagcgaacagggtgcccttcagagtctcattctcccatcttcatttccttcagccactcaactctggatggcctgagccttcactgattttcaatttcttggtttttattttttctttcactttttatgtttctattgtggtaaaataaatttaacatccctaaaatacagcattttagccatttttaggtgtacagttcagtggcattcatggtactcatagtgttgtgtgaccattgcctctccacttaccactccaaacagaaacactgcagccattaggcaactacgccccgctttcccttccccaagccctggcgacgacgtctcatctactttttgtgtctgtaaatgtgcctgttcatttcattcatttcattgaagtggaatcctacgatatttgtggttttatgtctggtgtattttgctcagcatcatgtttctgagcttcacccgcatcgtggcacatgtcaggactccgttccttctccaggctgaacacacttccactgtagcatctgataccacatttttctagccactcattggttgatggacactgggttccttccaccttttcggccattttgaagaatgctgcatgaacctctgtttcagtccctggtttcaattcttttgggaatacctgagagtggaactgctgggtcctgtggtgattctgtgttgagctttttgaggagtggctgaactgtttttcacagtgtttacaccagtgtcacattcccaccagcaatgcgtgaggtttctggtttctctacctccttgtcaatgcttattttccatgtttctgattatagccatcctagtgtgaagtggtatctccttgtggctttctgtgtttgtttatttgtctgactctgaatcgccttgggaaatacttgtaattcctccaaacctttggctcctgtccctgtaaataaggaatctgaagcagctccatggttcttgactgcatatgagattgacctggcgctttgatgtggcccccatgcgtgggctcctgctctggaggttctcattgtgtggatccggggtgggacacatgttttcctacaaagctgcctaggtgatgtcctgagaaccactgagctaagttttcctgtaaagtcaggtacccctgaggttcacaccctttgtgaggggcagctgctgggatccactgtccacctggattacagcccggtcacgctccagcacgttgactgtgaaggctctggttgccagatgcattgaaatcctcagaataagatctaaggaaacagcctaaatctctagaagtgctgtttgctcatttgctaatcagcaaaattcaataataaacagtgggcttttctgtcaaactaaatgcatggaagccgccatgggtttttttaggagcctgatgtgtgaccatgctctctgccagactatcaagtgcatcacagaggggctggcggatccggaagtcagaacgggacaccgcctttcactgtatcagcgagccgtgcgcctgcgagagtctccgagctgtaaaaagttcaagcacctcttccagcagctcccagaaatggctgtgcaagatgtgaaacacgtgaggaaagagcctgtgggtgctttggacttaggcgcgtgtacctggtttttttggaccagaagcatcctaagagctgttttgagtgtgtgttttcttttagactcggaataatctaaaactcgttttggacggctgtgtggccattgctcccagtctccccctaacgccctcctccctgaggagactgggttgcttggtgtggtcacaccctgggttgagtgacagatctcctgaatggggcctctcagcatctgccccggtttcatttactcactggggacctgtagagcagttctggtggttgaggctctcccagggccggaccagcgaactgtcacatccccgcagttctgcgtgtgtgagccccacgctgtgtgctctactaagtgactgactttgtggtaagggaggtcaatcctcacgatgctacaggcaggttttcagggacttttgctgacctgaggctaatagatgttattctgctgctgtttcaggtgaccatcacaggcaggctgtgcccacagcgtgggatgtgcaagtctgtgtttgtgatggaggccggggaggccgctgaccccaccacggtcctgtgctctgtggaggagctggcactggcccattacagacgcagcggttttgaccagggtaactgagcaggctttctcttgtggcacccagccccgggtggacgagcagcagcactggatgggctgtcagcagtgggctgctgtcctctctctgtcctctgctcacagtggaagatgctgtgggctgggggatgtcttcctattcttccccttatcaatgataaggagtaggtcaggggtagttgtcccacagggcctggctctgatcttttttcttttataaaaacttataaaagttatggaaggtactgcacaagcctttgtacagaagtcagggggacagtgtgctcaaccccacggacacccacttccattcagtgttccttctgttctctcctgccccttccctgggattttagaagctggccccagatatcctctcaggggccctgcggcccatgctagtcgctttcgggaacagccactgagccttccgcccttgggcctggcaggactctccctgtgcccgggctgcagggttaccagtgttaaaaacactgatattttcagatgtgtgaaaatcaggacatgatttcagtattccccgagtgttcggaagattaacaagtactatagaaagacaaccacaagataggagtttacaaagcccaggttctttctgatgagtgttgagattcatctacataatatctttattacttacagggaagggtgatgttattggggaagacgtgcaaatgccagtgaagacagagagatacagtaggcctgaaatggttagaaatagaagaatagaatgcacattcaaggccccgagagacgtggaaactggacactcgctggaggaggaagcaggctgggacgtgggagcgctgaaatgctttcagttgagccatgagcctgaaaaacacacgattcctttcccagagtagaaactatttttccctgattaaaatcgatgccgtgaaactgggctgaactctggctgccaggctttatgccacagggaattttgtgtcagagcgatctcaacctcttctgggaggtgatttctgaagtactgcaccaaaaatgatttcacttataacacaaatgcacagcatggaccacttaggagttaaggaacgaaccaggcacggtagcttacacttgtaatcccagcacttggggaggctgagacaggaggatcacttgaactctgaagacggaggtgggaggatctcttgaccccaggaggtcaaggctgcagtgagccaagattgtgccactgcactccagtctgggtgacagagtgagaccctgtctcaaaacaaaacaaacaaaggagttcagaaatgatctggcctttatattcctgcctgatcgtcagtgtattcaccaggacggaacactgactggaaatcaggtcctagctccactcctggctgggaaagagcatgaagtgttctaggaagaaaagtcctcctggaagacttggcaacagccaggagtcctgagtgaaccgctgtccttttgaatccctgagacgggctgcagggatgaggggctagaactgacaggaagacaggacagagagcagcacagcctcagaagtgcaggacagaggtgacccaggcaggcatgacgggctgtggcttcctgccctctgctctcacagcacccctgatcccactcactgtggtaccacgcagatgggttggggcctgtaaatgtcaggtgggaccagccagaggagctttgctgccagtactggcatgtcaggatgggggtctggtggtcagcacctcctctggccagtggtcttgtggggagaggcatccatgtggcctcctcctctgtcgggagggctgatgtgcagagaagtacggacttggagggcagctggatgagctggggcttgctcagggacacaggtctgtgtgttgtgccaaggctgaccccctcatcccacaccagaccctgcctctgactctgtgacctcagcacctgacttctgtctctcaggtcatctcccagtcagtaaaacatttgtgtgacgtgaggaggggcactgaagtgggtgatctttaaggccagatgtctctgtaaaagccttgactatcggaagcactgggctagggcagtgtagtacccagggggatgaggtgcatcagagcagcacctgctgaggccaagaacggaggtggctgctgccggcctccgggaggtccccttagggaagcatttcttcaggggtggcccagggacctccggcatcagggcctgcatggggattctgtgccagcccagccctgctaagtcccagccttgggaacctgaggagggtatctgcctatttttcttttaaacatgtttcttaggttattcactaaagtttgagaaccactgctttgtggctttgaaatgttcatttgaatttttctatgattactaagatttttgcccttaaggctctgtatataaacaacatactgtataaaataaactgggaatggcgtgaaaacagcatttgcttctgaatctaaaatatttctattattttcttgaaattgagtgtgcagtaggttatggtggtgttttggaagaaacagataaaacagattttgtgtgtgtgtgtgtgtgtgtgtgtgtgtgtgtgaccttgtcttagggattcatggcgaagggtccaccttcagcaccctgtatggcctcctcctgtgggacatcatcttcatggatgggattccggatgtcttcagaaacgcctgtcaggtactccagtgcccctgccccacgagtaggtccttctgcacacatccgtggctcacgcccacctgggcaccgtgtgtccacagccagcagaaaccatctctgttacggtcctttgggtcatccacaggtcaagatgataacttattttaaaaatctgagtaatagaatttaagatgtaagtatgtgaagttttaaactttaatttagcctccaccttacatttagacctttcgtataaagtaccatcagcatcagccctcccgagcacctgccgtgtcgcaggcactgtgccaaggagctcacagacatgggcacatctgcctgttcagaggtccacccagctaagcgaaaagctgtttttgcaaattattactctaaaaaacaagtttaataaattgcttttatatcaattaacttttacttatcttttgagagaaagaatgtatcggttggccggtttccaagttttgtatgtactgactagtcctctggtgaacacggctctctgcaggcacagtatgacagcttgctttccctgtgacacaggcattccccctggacttgtgcacagacagcttcttcacaagcagacgcccagcccttgaggccaggctgcagctgattcatgatgcccccgaggagagcctgcgggcctgggtggcagccacgtggcatgagcaggaaggcagagtggcttcccttgtcagctgggatcgcttcacgtctcttcagcaagctcaggtaatggttcacctgcatggcaggatttgctcagaaagttaacaccgccccagtgctgtcttttcagcaactttatcaaaatacacatgtgtgtatatgtaaatacatgtatgtgtgtgcatatatatgatatatagtatatatcatatataaaatatatattatatctttattatatttattatattatatattatatattacatattacatatataatatatattatatattatacaatatacaatatataatataatatatgaaatatataatatatcatataatatatataaaatatatattatatcatatataatatatataaaatatataatatattatatcatatataatataatatataaaatatataatatattatatcatatataatataatatataaaatatataatatattatatcatatataatataatatataaaatatatatcatatataatatatataaaatatataatatatatcatatataatatataaaatatataatatatatcatatataatatataaaatatataatataatatatatcatataatatataaaatatataatatataagatatcatatataatataatgtataaaatatataataatatatatattaatattatataaattatatatatgagaataccctatccccctggccccaatgccactgttagtgatggaaacatactagggtgttagaaaagccccagctgtgcctttgccacccctgagttgacagctttcttttgcttgccctgtggctgaggcagggaggataccttctgtgttccttcaactgctgccctctatgaggccatgctgtcgcgttcctgagtgcatcctccacatccctcttcctcagcgctccccagcatggccacgctggcagaagcctggaaactgaccacaggaggaccagtctcccaccacttgccagtgggattccagccatggctctgcagctctggtacaagcagcagaacagcgcatggtgggcctggggtccatgtgcactgaattacatatacactgagcttttctccgtctcgtgatccctggagcctatttccattctctgtcacgagggaagtggctaactgtcctgtgttttgtgttcaggatcttgtctcctgcctggggggccctgtgctcagtggtgtgtgcaggcacctggctgctgactttcgacactgtcgagggggcctccccgacctggtggtgtggaactcccagagccgtcactttaaggtcagttgaggcagaatggaaagtcctgttggtaaccttattagcaactgaatcagaggccacaagtaggcatttcttgagtggctgttggcaagattgaattccttgagagcttttgggccgagggcctgggttcctgtgggcctgtcccctgcgactggcttcatcagagcaggcgggtgagaggagccccagagtgtgagcaagacagagctccatctcttatgacttgatgtggacatgatgttccatcactcctgctgtattctgtggttaggaacgagtctctagtccagctgacactcaaagggagggggtcacaacgggtgtggacaccaggagctattttagaagcttaccgataattgtacattttaaaatgacttaaagagtataatggtttgtaactcaaaggataaatgcttgaggggacagataccccattccccttgatgtgcttagttcacattgcatgcctgtatcaaaacatctcatgtaccccataaatatatacatctactatgtacccacaaaaaattttttaaaaagctcagagagtgaacacttccttgaacgctgtccactagcccagccctgctgcccatcactggtgatttgttttctcattattgagttttgagattaaaaaattatatatcctggatacaagtcctttatcagtgacatttcatcccagtctatggcttgtcttttcattttcttaatagtgtcttttgaagagcagaggtttcaaagtttgacaaaatccaacttatttgttctctagtggatcatgcttttggtgtcacatgtcagaaatacttgcctaatccaaggtcacaaagagtttctcctttgttttcttctagaagtgttatagttttaggttttacattcagttttatgatcatttgagacgccatttgtatacagtgtggggcatgcactggaattcatttgtggtgtgtggatatccacttgttccagctccatgtgtcaagaagaccatgcttcctccactgaattccctctgtatctttgtcaaaaatcagtaacccatatatatgtgggtctgtttctatatactcttcggttccattgatctgtttgtctgtatttcttgattattgtagctttagatacatcttggagtcaggtagtgtaagtcctataatgacttgtttttcaaagttgttctggctcttttgcatttttatttgaattataacatcaaattttaagtttccaagaaaaaaaaaagccagctgaggccgggtacggtggctcacacctgtaatcccagcactttgggagacagaggtgggcggatcacgaggtcaggagattgagaccatcctggctaacatggtgaaaccccgtctctactaaaaatacaaaaaattagccgggtgtggtggcgggcgcctgtagtcccagctacttgggaggctgaggcaggagaatcgcttgaactcaggaggtggagcttgcagtgagccgagattgcgccactgcactccagcctgggcaacagagcgagactccatctcaaaaaaaaaaaaaaaaaaaaagccagctgagattttaattggaattcctttgaatctgtagaccaatctgagaggaattggtatcttaacagcattattttgatcagcaaaaatgggagttgattttgtaaaatattaagaatttttgcatatatgttcatgaaggatattgagctgtacttttcttttcttattatctctttgttgggttttggtttcagagtcataccagcatcagagtgggatggaatagttggtgtagaattagtattattccctaaacatttgatagaattccccagtgaagcagtatgggcctggagattttggggggaggaaaatttaaagctataaattaaatttatttttaaacaacataaggctgttcatattatctgtttcttcttgattgcgctttgctagtttgtgtctttcaaggaatttgtccatttcatttaagtattgtcttaaagttgtttatatttgtttcttttctttttttttttttttgagatggagtctcgctctgtcgcccagactggagtgtagtagcgtgagttagctcactgcaacttccgcctcctgggttcaagtgattctcgtgcctcagcctccctagtagctgggattacagctgtgcaccaccatgcctggataatttttttttttttttgtatttttagtagagatgaggttttgccatgttggccaggctggtcttgaactcctggcttcagatctgcccaccttggcctcccaaagtgctgggattacaggtgtgagccaccgcacacggccatgtatttcttactgtattttaatatctgtagaatctttatctctgtcatgctcttattcttgatattggtaatttgtgtcttttctcttttttccctaatgagtctggcaggaggtttatcaatttactgattttctcgaagaatcagcttttggtttcatttgtttttttatttcctagtttctcaaggtggaagctatggtgattgctttgagaacttcttttctaatagagttaggtagtgctccaaatttccttctcagtgctgctttatctgaacctcacaaatttagtagttgttttcattttcattcagttcacaatactttctgatttcccttttgactcttctttgatccttggcttatttagaagtgagtcatttacatttccaaacacttgagagattttcaggtatctttctgctattgatttgtaatttaactccattgtattcagaggacatattttgtatgatttgaatcccactaaatttgttgagacttgttttatggtccagaatatggtattccctggtgaatattctgtttgtacttgaaaagaatgtgtgtttagcatttgttgtgggcagtatttttaaatgtcaattaggtcaagttggttgatagtgttgtttaagttgtctgtgtccttactgatttcttatttacttgttctataaattattgagagaatattgatatctctgattataattgtggtatttcttttctttttttttttgtttttgttttttgagacagactctcactatcacctaggctggagtgtagtggcagtgcgatcctggatcgctgcagccttgatctcccaggctcaagcaattcttctgcctcagcctgttgagtagcccgaactataggcatgcaccatcatgcccagctgattttttttattttttgtagagatggggttccaccatgttgcccaggctggtctcaaactcctgggctccacgttggcctcccaaaatgctgagagtataccgtgcccagccaatttgtgtatttcttcttgcgtttctatcactatttgcttcatgtattttgaaggtctgttataagacgcatagacttttaggactgtcatgtcctcttcatgagtctacccttttatcattatgcagtgaccccccctttacacctggtaatctttgctctgaaatcaactttgtccgatattgtcaacatgtagccacttcagccttcttttttttaatgttaacatgatacatttttccattcttttacttttgacctgttttatcttatttttaatgtggatttcctgtaggcatcatatagttgggtcttacttttgaatccaacttaacctctgtcttttaatggggtgtttggaacatttacatttaatttgattattgatatccttagctttaaatcctgatacttattttctctttgtctcagaactcttttgtcccttgtctttttcctgagtagctggaaccacaggtgcacgccaccatgcctggctaatttttgtggtttttgtattttttagagatggggttccaccatgttgcccaggctgatctcaaatccccaggctcaagcagttcacctgccgtggtctcttagtgttgggattgcaggcatgagccacagtgcctggccctgtcttatttttaaagattgcatttgatagctttgctggcttgttagctgtaactgttcattgtgttgaagtggttgcgttagtatattatatatcttaaacttatccaccttcaggtgatacacactttagagtaaaaagaacctttcaataatatatatcttcccttccagcctttgtggtgttttcatatattttacttctacgtgttatatgttctataacatattatttttgctttctacagttgattaatgagtctgtatttactcatgtacatagcatttccagtgcttgctattcttttgtgtagatccaggtttctgtgtagtctcattctcctgcttgaagaatttcctttcacgcctgtaattccagcactttgggaggctgaggtgggcggattgcttgggctcaggagttggagaccagcttgggcaaacacagtgagacctcatctctacaaaacgataaacaaattagctgggtgtggtggtgtgcacttgtagtcccagctgcttgggaggctgaggtgagagaactgcttgaggctgggaggtcaaggctgcagtgtgctgagatcataccactgtataccagcctgggcaacagagtgagaccttgtctcaaaaaaaaagaaaaaaagaaaaagaaaaaatttccatgtctagaagttctgctagtaatgaattacagtagttagccctctgtatccatggtttctgcttctgtagatgcaaccatggactgaaagtatttggaaaaaagaaaaacaataaaaagtaactacaacaataaacaaatcaaataaaaatacagcataacaactattttcatagcatttatattaggtattataagtagagatgatttaaagtatatgagaagatgtgctagaatatgcagatgcgatgccattttatatcagggacttgagcatccatggattttggtaacagagggggtccttgaatcagtcccccatggatactgagggatggctgtatttaggttttgtatgtcttagcctttatttcacctttgtttttgaaagatattttctccgtgcaatgaattttatgttgacagttatttttcaatactttaaaaatattagtctactgtcttctaactagcatggtttccaatcagagaatctttttttttcctctggctttaaaaattctggctgctttgactatatcccctgattatacagttgtgatatttcctagggtgccgttacatttgtgtgcctgggattcattgattttcttcaatctttgggtttactgttttcatcaaatttggaaaatttttggccattttttctttaagtatttttttttctcgttcctttggggactctaattaaatgtcccttaggctgctaaatgctgtatttaaacaatttttttctatattttacctatagtttttattgctgtgtcttcaagtctagtgatgtgtagtgaacaaaacacacaattcttgccttcatgaagatgacatgtagtatatatttttatcttatgaatgccatgaaagaagtgcatagggaggatatacttagagctgtgacctctccagatcagtttaagctgagcattgaaaggtaagaagtcaggcatgtcaagaacagggagaaatgtcccaggcagcgggaacagcaagtagcaagtggaagtgagggccttggggtagggaagagactggtcatggcaagaaggttagatttaattgaaaatgtaacagagtaatcggagggttttaagcaaggaagtaaaatccagtgcatgctttaaaacaatttttcatttgctatactaagaatcagtttactcatcctctgtgaagaactgtctagtttctacagaatagaagaatttctgaataaatttcttagctacatacagacgcttctcaacttatgatggccttatgtcctgataaatcctacacatcaactgaaaatattgttaagttgaaaatgcatttaacatatttatcccaccaaacctcatagcttagcttagcctaccttaaatgtgctcagaatgtgtgcattagcctacagttgggcagatcatgtagttcactgcaaaccgtagagtactggttatcctcatgatcatgtggctgactgggagctgtggctcactgctgctgcccagcatggagtatcatactgggaaaagatcaacactcagagtatggtttctgttgaatgtatatcacttttgcaccatttttaagtcaaaaaatcctaaggtgaaccattgtaagtgaaggaccatccgtatatttgtgttacacttacaaatacagtgagagagcagaagagccatttaaatagttgtcagtgacaactacaacttacttgaatggcttttcattcagtaagatactaataacaacttttaaaaatttcttttccagctggtggaagttaaaggccccaatgatcgtctttcacataagcagatgatctggctggctgaactgcagaagctgggggctgaagtagaagtctgccatgtggttgcagttggagctaagagccaaagccttagctaaaaggtatggaattggggatatttggtcatacattaatgtaagattttcaagagtataaaacatgttttatttaattttgttatcgtgcattataaacctgatagtttgacttgtcattttacagtgtctgcatatcacaaaacagtgtttgcttgaatacactcattgattccacacagtgggtaataaacttttttttttttttttttttttgagacagagtctcgctctgtcacccaggctggagtgcagtggtgtgatctcggctcactgcaacctccgcctgctaggttcaagtgattctcctgcctcagggtccccagtagctgggactacaggtgtgcgccaccacgcctggctaaattttgtatttttagtagagacggggtttcaccatgttggttggccaggttggtctggaacttctgacctcaactgacctactcaccttggcctcccaaagtgctggggattacaggcattgagccactgtacccagctcataatgaacttttttaaaagagaaaaattttgttgaccattattggagctggatgcatctatatgattagatgtgcaaaaagctggaaaactcaaaaacaagtgatgattcatctttaggttttttttataaaaaagtagtggctgggcacagtggctcatgcctgtaatcccagcactttgggaggctgagcgaggcaggcgcatcatgaggtcaagagatcgagaccatcctggccaacatggtgaaacccatctctactaaaaatacaaaaaattgggtgggcttggtggcacacgcctgtggtcccagctactcaggaggctgaggcaggaggatggcgtgaacccgggaggtggagcttgcagtgagccgagattgcaccactgcactccagcctgggagacagagcgagactctgtctcaaaaaaaaaaaaatttaaaaactagcataaccagtgtttccttcaagtaattaattatatgggaaaccgagattcttgaattaagtttttctttactgccctatacacatttagctgttaaacttttatgattatctaagaagggctgaaacagttgaaattccaatttctttaggaatcaaaacattctcatgaagttgtgttgatttataacatgtaaatgcttgttctactgattgggcccggatcatgaaaggaatgaagtctttatcagaggcagttgtccttcattgtccatctccctgggaccatccctaataactagataggggtattttctctgttgacagtacagtcaaatcggctgctcatcaccattgtgggagggtctcaggctgggcaagggggtgtggtagaaaggtgatttatccatgcgccaggcccgggagtcagggactggaaccccagtctgtctcttgacttctttgaagccttcttgggggaatattactccccagtttttatatttatttattgaatggaaggaccagttagggcatgatctatcaatatccacatggctttaactttagccacttccgaattgctgttaaaaaaagttactgatcactacctggctttagagggcaagcagaaacatcccatggatgacacagaagtatgggtaggagaagatgccttcacctcttctatcaatcactgtgttccagtagatgatttcatactgacaacaacaaacagtcgctgtggaattttattaagccatcaaaatttccttcacattcaatactgttgaacaacaagataacacatcttcttgctcatcccacttgaactcaagtcatcaattttaggcacaaaggttttagttttctcgggaaatcaagttttaaccacttgaggttactactgcagcaagcagattttgttgacaaatgtgaacagctttcaccctctgttagtacaaattaatatcctttccttaaataaagttagttagctatttttggtttcaaaatcagtttccatcataaaataacagcaagacactgtacacctttacgttcaatactagaaatttcacccagtgcatcagcatctgtgcggcattccctcagcacgggctctgctggcgggcagcaggggtgctgagctctctctagtgcgccctgtgcagccacaccactgctgtcaccacatgtccctctgacggcagaggtggtataagcagcttcaccctggcccgactgaaggctgtcatagttgtttttcatattatgcacaataaactgtagcacaataatcatgatataacaactgtccagcaaaaataaaagtattttacatttgattatcatacaaaaatatgcatttttctatttttaaccattattaatagtacctaatatttttaaacttgtaaattaacaacaataaaatactacaagagttaaaataaacgtgaaggaagaaaattacagagggaaaaatgctcaatccaaaacatttagtaataataaaaaagcagctaaatgaaaaagggagaattgtgattacactgtcaatggcaggatacgctgtggtgttataaggagattgggtctggtttctaatcaaggactgtaaaatgtttaataattctatttgtataaactgaaactagcccttattttctaggcaacaagttggcaaaaaccttgggtttacccataaagtgaatttcttaagatattttttaagaactcctgtcctgttatatccagagacattatcaaattttaaaaggcaaataattcaaaaagaaacagctattcagtacatataaaggtaaaatacagttatcttgaaaacacttgttttagaaaaggaaataagctaactagacactttactataaaaattttccatatcttaggatggcagtttaagaaacagtcaaatttgaaagtatccatgttttaagcggggaatgaggagtgtgggggaggtggtgccccgtttcactgctgtaagaagcttcagctttgaccgctacagtggtaggtaggctcttgtcacacagtttggaaatactttactttagagagattcagatcaagcaaacaactgtgtctgctcattctcctcaactttgctgtccaaagttgggggctgggggagcacttctgtcgctattcaaatggcagtgttttgagagaatccatttttttatttctcctctattcctaagcattaggaactatgagagaaggacatctgtgcaggtgcccaactcgtaacctcattagttatttccagggggaagtgccagcaatagtttaccacactggaaatactgatggccaagcccagcacgcctcccagcaagccttgtttgtttttgagggcgagttttggcatagatggcactctcctgtctacagcatacacctctgtggaatcagcaccccagaggccactccccagtggctttcagaggaacaagactctggggactcctggctatgaagcttagtatgaaaagcctatttcaaatatgcaatgggattttcccaccccaattttaaaaagtgaaattatattttcttctgtaatatttgtatcctaaagtcaaaggcacttctaagtttaattatctgcagcaaatgctttaaaattaacagtgcatatcattttaaagttgaccctatgaagttaaaagcaaactcatgatttcaaaacacagtgatctaaggttccaaagaaggtgatctaaaatcataaattctggccccagaacactgaaccttcatcaggtgagttcaattagagacgacagaaagtaaccagaaaaatacatgaatacttcctaaaacctgctggaggttttatcagatgctcctaaaaatgacacgaaacacaaatttcctaactttcctgttgtctgctgcctggggctgctaatgtgactgactatcagatagccttcaggaggtggtaggaaaaatggatggagacaaaaatgtagcagacaacatgaacagtttgatcacggttacaagagccagacctgtaatgacagaaagaggacaggaacaaaatttacatctctcttaaaataagtgtgaaagaagcatgattcaacatgtttttaaatattagtgcaaattccaactattattcttacatataaagttattagagattcaaacgcctaggttagcaatgttaattcagaggaaaaaagttgacagcttccctcaaaatgttcagaaaacaccctattttagtcttcatttgctaatgtctcagtagacaaccatattttggccccacttaaaaatttgcttaatggtgttcctaaaatgcttcgtctgcacagattccctacaggagaaaatggaaatgaggaggagagaaactccggtgtccccgaggtgtcggtgtggtgagggccgctggcgttgaagtacatcctgctctggcccagctccccatagcaggcctccagggggccactgcgctgttgccgcagcatcctgctcagtacgtcgacttcatcagccaggagggagagcttgtgaaaggctgtgatggagccacccaggctgatctgggcctcgggaacccagcggaagtagcacagtttccacagttttatgtgtgttccagagacacgtggcagaataacaccgtgcaggttggcgggtttggaaaaccattctctaaaatactgctccgtatcactgttctggctgtcggtttgctgagctggatctggctttggttttaatatcaatgaatttctccttggaagtaattcttggtcactgatgattccattctttaaggcagacggcattcctcttagtgtggagctgtagcttttctatacagaagagattttattatgttccggggattccctttttagaaagattgaaggatgcaatggcaaatataaactcaatactatgaaaaattaatggaatttcagcctcaaagaacattttcctcccttcctttgtgtccttattctaatcctcctcccctggaattacacttttttatgtgttgactctacctaggctgttactatcagcctgaatgggggcgggatgagagtacctcctatccactaatttgcttaaggataagttctaagacgggctagaaaaaacactagacctggccgattctatcaagaacaatggcaaactgaacagaggcagtcaggaggccaaatgtctgattctttgttctgtacctttcagtagtctgcaaattttctaccaaaaaaaatcccaagaatttatttgggaattattaaaaaggcaaacaatgaatgttattaggacaagaatatagcagtcaggaggccatgactacatcacagccaggcggcattccctgccacagtggcggcttgaatcatcaagaaatggataaatggggctttagtaaatcaggcttgcaggctcaaagctgcaatctgcccactctcaggtactgagactttgtgggcctcagacaccaggaagaaagctgggatacagtcatttgagttaaaaagggaatgacccctcagaaacccgcattagcagtgttactcttggaagtgcctttacttttaacgctctctgttctgaaaaagaggtgtttggttacgtgtgagccaacatcacgttttgttagctgtgatttacctttgtccgtttaaaagacttcacggagccattctgtatacaaggtgtgctctttccaatgtagaaggggttatggaaaagggtgcgatcctttgctgtaaactggagagaccagtcccaaacagaggggaattttaagcccttctcatcacccaattggatgtttttgcttatagcaaattcctgcaaaataaataaataaatatttgcaaaact

SEQ ID NO: 48 - DNA, 52664 bp, Homo sapiens
agaaagggcctgggcggccgcactgagagctttacgcccggaggcgtcggcgctgccactggcccgcgacgggaacggggcgaaaaggcggcggcaccatgttctccctcaagccgcccaaacccaccttcaggtcctacctcctgccaccgccccaggtaaacaacccctccccgcgagcgcccgactctcctctgcgcttccgtggagcctccaggccgacccccgggaactggaggaccccaggaggctgcgcgcgtctccctgcccacagcagcgcggctgcctgattcccggcgccgcgaaatgcgccttctcgggagcccccactggctcggcgaaaacttgtaaaactcttctgcagccattctctgcccgaagttctgtcgtccgtagttttgcggagtgttgaggcccaggggagccttgggagctggggttttctttagtttccaacccatcgaccctccctcgtatgaccgccagcatgattgcagcgcttggggtcactggtcgaggcggttacccgtctgtcataaatgtgaacacctggaagcgacactggcagtttaaacattttttattattaggcttccaagtcgataatgagcagatcttaaaaacagctcagttaatatgcgaaagaatttaaatggggggctgtgtgtctttcgcatgtgtcatcacttagaaaacaacatttgctgtagcattttacggagggtggggggattgagattttgatttattttgctaatgtatttcagactgacgataagatcaattcggaaccgaagattaaaaaactggagccagtccttttgccaggtaaacattagttaggattctaacagatactttagcaacgtattttggtttaagattattctgccgactagtatcatgtggttaacttcccttctctcattaaactttctccagttaaaagtctagtgactgagaggagaaaaaggaactgtcaagaatgtcattacctcatttccttttttgtctcccgaatttctttttgaaaagatgtatatgtttaattgcttgggtagtaaaagtactctttgctgacgtgtttgccacttattgcattaatgattaatcattttaatgcattttgatagtataaaaagacgcctttattatgtgtgtgtctctataccaataacagagcttagtgaactttgaattacttgcttggcaattgttttttgaagttgtcagctgtatttgcaaatttgcttgtttcagtttagaaccaggcttttcccagcagagacacttaattgacatttggggccagataattcatagttggacgggcaggctgtcctgtgtatagcaacaaagatggcctccacccactagatgccagtagtagtacccttatcccccaccacctagttgcgacctagttgccacaccaaaatgccaccagtcattgccaatttttttttgtcccctacctctgggggacaaaaatctcacagttgagaatcactgctttagaacaaaatttgctataggtgaccttagagatggaagtagggattggtggtagaaaggggtttgttttagagcatacagaatattggtatggtattttgaattgtataacaattgtataataattaggaaaagtcagttgtttaatgcgattattaggggaagtagccagatacttaggaaagcctgttttaaacctgaaatcggccgggcacggtggctcatgcctgtaatcccagcactttgggaggccgaggcgggtggatcacgtggtcaagagaccgagaccatcctggctaacacggtgaaaccccatctctactaaaaatacaaaaaaaaattagccaggcatggtggcgggcgcctgtagtcccagctactcgggaggctgaggcaggagaatggcatgaactcgggaggcggagcttgcagtgagccgagatcctgccactgcagtccagcctgggcggcagagtgagacaccgtctcaaaaaaaaaaaaaacctgaaatcaaatactagtttgtgtggctactatcagcattgcaaaatctgactcattacttaaagccaaatcggtaaaataattagaattttgtaggtaaaaattgaacaaatgtggaaactttaaaattttaaatattatatagggacaaaatattaaaaacaccaaactttggttccatatgaaagtttaaaaagtgttttttaaactttactatgggagtcataaatattttcccttgattttgttagtgcttttcactcaacagtgtgtactaattaatcatttgtacttttcctcagagtgaacagtagaattactaagtaacccttgctccctgtgtgctctgttttagtcttagtcactctgagcatttaaaatgcagggacgaggaaacagtactcatcttgaatgagtgcctatgagctattgaactttgacttcgtttactctgaacaggcctggttcttaggctttgattcctccactctgcatactatgatttcacactcagaaacaacatggtcttagctgtaaatgtcagtgcttgctttttaattttttaaaattttttttaaatttttttttttttttttttgagacagagtctcactcttacttgggctggagtgcagtggcgtgatctcggctcactgcaacctctgcctcccaggttcaagcgattctcctgcctctgtctcccaagtagctgggattacaggagcccaccaccacacctggctaatttttcgtatttttagtagaaatggggtttctccatgttggccaggctggtcttgaactcctgccctcaggtgatccgcccgccttggcctcccaaagtgctgggattacaggcgtgagccactgcgcctggccacttttttaaaattagcttttaaatttaagatatgtgctaagaaaaggtgttactaagtatgcataaacttgaagaactttctcactgagggttatcaattctataaaatggctaaaagtcagagttttctggggaagttgtaaaccaagtttctgactgtgcttttcttgtcccagaaatggcagctaaattccgtattatttttagagaaattctaaaagagctgtaacactaagtctgaaccttttagttgcccattaaggaattctctgacctgtgttaatttttattgcattggcggccaaatcatagctgaaatctgtacatgcatacatgacggctctatcacccagcattctgtttgtacctgacttatccttacccaacatttagccggtcctgaattaggatgtcttttgcccccttcctctccccttctgttcttaccctctcattctggccttcctgcacccatcctggctgtgttctgtctggctgccctgttgtggtctctgtttcctgctttacctcgcctgtcacatctctcactgctaccatttgctctttgttggcctgtagcctactgctctacccatgaaatctggaagacaagtggaaagttaccgaactattggtgatctaaagacctagactaggctagagcttttactaagagggagtgaataatatagttcttgcctttgtgactatcagaatcaatagaaaacctggccacatcacctgtggctatatacagggatgcagaagttattgttcaacatggacaccgggaggggaacatcacacaccggggcctgtcgggggtgttgggggtgggggatgagggaagggagagcattaggacaaatacctaatgcgtgcggggcttgaaattcccggcgtcatccctagatgacggggttgatgggtgcagcaaaccagcatggcacgtatatacctatgtaacaaacctgcacattctgcacatgtatcccagaacttaaaaaaaaaaataaaaaaaaaaagaattaattgttagagatatggtattgcatgctttgctttggcataatgccttgggtccaagggtatcctacttcagttgcccaaagtttgaacttctaattcaataagcagatgaaaattagaacacaaaatgagttgtttatttgtgtgctgtcaccatgtgcactgttggaacttaagcctaatttcaaaatgatcctcatcttttattaagtaaagaaaacagaagaaaatgactagtaatttaatttagattgtggtttatgttagtaattttcagctttcctgatacatgaaactctgagatgggtattgtgcctacttcaactttgtggtcttgatgtctcacaaagtgccaggaatgtggtagacactgagatgtttactgagggactgaacgaaaggacctctcagaccacctggcttaaactgttaccttacccaggcacacacacagactaactttcagatttaggagtaaagggaagactgtgttattttatgccagacatttcaagagatttatgtcggagcctggaattgaaatagagtactctgtcaaagtagtcagcttttgtgtaggctttctctttatcttcctctcattatgtgaatttcattctttcagtgattatattgtatatgtgtaaaatcactccaatacttgaaaactgagtttgacttttaaagtgtgtgtgtgtatatatgtttgtgttccagtatatatttgttaagagcatgtaatgccagactctgtcctgtttagctgctggactggtggatcggttcggtgaggatgtgagtatctcctgggtgccaggtctgtcctggatagcgagaatgctggaggtgtcatgtgcctgtatcgcagaaaggcgtggggtgagccctaagctgcctgttgacaaggtagaagactgtgacctggatcactggtacccagattccagccagggcctggtatcagatttggatgaagtttttaccagcccttggtcaaagtgagaaaattaagaaaagtgcagttttctttaataaagataaatttatttgatttaaaagattgtcttttattctgagattatgttcttctaacttacttggaatagatactttttttgttaaatgttggtgataatagctgtagctttaaaaaagtttttaagttaacaaaattaaaaagttaaaaactctttattggtcctttaaattagttttgcactatacctggtttggaatctaaactagaacctactagatgagattattataatactatagatacaattttgtgagcactcacacagagaacattaattattttgtctgcctaggagtactgccatttttttgtttgtgttttgagacagggtctcgctctgtcacccagtttggactgtagtggtgtgatcacggcttactgcagcttcaacctcctgggctcgagtgatcctcacagctcagcctcccaagtagctaggactacagacgtgcgccaccacacctggctaatttttgtattttttgtggagatggggtccaactatattgcccaggctggtttcgaactcctgggctcaagcaattggctcaccttggcctcccaaagtgttgggattatagccgtgagccaccacacccagcccccttccaccatcctctgaaaaatgcatcctccctcttttgacaaattatcctttcctgactaactccacccaaccttgggttccagtgtggccagcaaggttaataacccaccctggactgcaagcatgaacacaggtctgcctctggatgttgttaggttggtactaagggaagaggtcctctttggtaatgctgcaagtggccacagttccagaagaatctgttgaaaagagtgaagaaccccaaggaagtgcactaatgtgtgttgaagtccctgggtttcattgtccttgcaggccaggtgacacaaaagccttgtattcttctttttgctaagctattaccaggcatgtttctgaacatactttgaacgaggatccttaactaatatagcttgcagattaatcatcataacagtcttgtcagctaggataccagtttatctccatttgacagatgtgaaaactatagtttgctgaggttaagtaacttgcccagtgtcacacagctagcaaggcagagccagagttctctgtccagctcccaggctgtgccactaactgctaagtagcacggcccacctggctgcactggtgacactagggtacagatttatgctttggaactgttggggagtagattggatgtcagcctagagggagttctctagtgaagtaaaaagagctctgtccttgtctttgcccttttcacaacagtgacagattttgacccagcgtgcagaagaactttcagagaatttcagctgccagaaaatggaatgtcttagggaggtagtggacttcctgttgctggctgtgccgaagcacagtctggtgaaatgccagcagctttgtattgaggatgtaagatttgcagtgagtggggcttgatggcctttgctctcttctcaccccagggcatgctcttttttaagggagaagagttgaaatgccaagactaacgataatgaatttgttctgcaggtattgagtgtgtgcttgatgcagtttggcagaagggtaaaatgctgaggagatgggatcctgttcttagacagtttcagttcactggagagatgcttcagtagaggagagaaaaagtagtaagagctcagaggaaggtcacctaagccagatttggagtagggcaggggtgtcaagaaagatctctggaaacaaatgcttgtgctctgaatcttgagtgcccgttgagcctgggcccctgtgctgaggctgtgcgtcagctcagttctttccctgttcgcatctacagtgctcacagcactttcattcttgagattaactattagataatgaatgcagtgattgtcagagtcttttgtaatcggatcagaaaagcatacaaccatgggccatctgggaaatgaaaatagccattgttgtatagatgtcttgtttattttttacaagctcactggcccgtactgttcttgttttctgtctcaccatacgtcttatttcctcagttgggttgttaattccttaaaggcaaagactttatctttcaagtgttttatgtaattcctttttgtaggtaggcttcataaatgattgtagactgatttttgtagtattttaatttgtgaatgcattgtttttgaaagaccaaaggacttgtaacacaccctcagaacagtgaacagtgtaactgtactatcttagcattagctttataccttacccgtagagccttaggaatgtttggagctgtccattccttaggcttttgctgcagtaccttaggccagcattttcttacccctccaaactcctcactatcgttgtcaacaccgttcatgaacctccataaataaaatcctacttaagcaggataaaatccaaattctttaaccttgtaatttgctaacactgtacctcactgacttcatttctcagtatttcccaatattgatatttgcttcaatcatgccgcttccttggtctcttccagatgccttattccttatttaggaccttgttactgttattatcacacattctctactatctcaatgctcttcttccttcaagatttcattctacaatttttcctgagatcggcactatacccttcctcctgccccatcctatcctgagtgctactcactggacttggtacttgcttttttacattgtgtgttagtaccagcattaaagatttgtgtttatcttccacatagtttcaatttcctgtgataacttttgagccactttaattcctgaatttacctaaagctagggtgaccagcttgtcccagtttgcttgagactgtcctggttttagtgctaaaaataccacatcccagggaaacccctctgtcccagacaaactggggcagtcaccctactgttaaaagcccaagttaagttatgcttttggcctctacacatcccacaggttaattagccacgtgtgccgtgagactttgccttaaactgtgttccaacctaaaatgtatgggaaacattatttctgtccatcaaacgtgatgaatttctaaatgtataaggtgttaggaaagataatacaacatggttttgaggtcctcagggagttaaaaactttcctagccatatcatttggaggtttattaactgtaattgcatttcccttcttatttatatttacagatgaaagggtcttgagaaaataaacttggatttcttgatttcctcccaggtgttagtagaaacctttggctcatcatcctctaatttagaaggtttttgcttaccgcacactgaagctaatttcctgctttttctggcttcatgaggcttccttgtggcatcctgggaagtgcttggtgctgtaaatggtcccaccgtggctgatggcatagcacagagctgggagagaggagtctggtgggttctcacaagcaggccagccagccgtctctagcacaccacccttttactgcataaaaagcacaggcgtatagtctccctgaaaacttcagaacctctagagctttgaagcttttattcggagttttctcttcaaggtcacttaatttaacatgtgaacaagagcagtctcagtaccttctttttatatatcctatctgggaagaggccactttgtgtcttctttttcttccctgtgtataagctagttttctggcccacagtgtttcagtgcatggcaggagcttatgacagctcctcttcagcattccttttttttaaaattatgaacaaatgacttacgtgagcagacagctgtgctacatgatccaaatattttaaagactggttctgcatgaacaaaatttagcattatcaaataaaactcatgtcactaactcgacacttaattattgtaataggaagacccaattgtagcatatcctcagaagtgcccttcttttctttcttcttcccctgtatccctctgtacttctgttctttgctctcttccaagggctcatttccattctgtaagaaaaggctgtgtggcgcttaaaagaccctggcccagagagtccttctttcactttttttttcttttttcttttttttggctgttgttaatgttgtgtctcttgtttattttcttctttagtagttttattttggaatgaatttgaatttgtaagagttgtacaaaagaggatagagttaatgtgaactcttcagccagcttccgctaatgttaatagcttatgtaaccttggtgaatttagctcaactgagaaaccaacaatactattagctaaactgcaggttttattcgtatttccctagtttttccacaaatgttctttacctgtttcaggttcacatccaggatactacatagcatttagttgtcgtgtctccttattctcaatgtctcagtctgtgacagctttttcatctcatctttcaagaccttgacgtgtttttttctattgaatttgattttcttttttttctttttcttttctttttttttttgagatggagtcttgttctgtcacccaggctggagtgcagtggcgtgatctccgctcaccgcaacctccagctcccgagtttgagcgattctcctgcctcagcctgttgagtagctgggagtacaggtgcgcaccaccaggcccagctaattttttgtgtttttagtagagacggggttttaccatgttggccaggctggtttcgaactcctgacctcaagtgatctgcctgcctcagcctcccaaagtgctaagattacaggcatgagaatgagatttttattttgcctcaaataatacatattaaagctctttaaacatagaaatatactactacaaaaggaaaaattttataattactagatttctgttctaacaaaccaccccctagaaacatcatcaaattgacttaaaaatgtagacgtaatttcagacttagagaaaagttgcaaataacagaagaatctgtggataccctttccttagattccccaataaaaccttgacgctttggaagattattattcaggtagtgtcttgtagtatgcctcttggtttggatttgtccgatgttttcttttgattaagcagaggttatggattttgggaaagacccacagaggtggtatcctttgcccttgtgtcatgtgagcaggcacaagacatcaacatgattggttattggtgaggttaacctcgatcacttcaggttaaagtgatatctgtcaggtttctcctctagaaagtgactgtttttccttttctgtactgtttgttagaaacaaatcactaagtgcagcccacattcaagggattgggaattaagctccacttcctggagagaggagaatcacgaatttatgggcataccttaaaactaccacagtaattagtcaatacttttgggaagatagctttgtgcttatacaaataacctgtttctccttaaagtttggctctctgaatttagcattcatcaatgcatgttgcacacagcagtcattcagtctatgacattgagtccatgatagtttcttgatctttactgtaatgttctaatcatgattttgtttccttattcctcctacatttattaattggaattcttctgtgaggaagatttgtctcttctccgccatttatttatttattattcagtcatctgttgacaacagtatggattcacagatactttttaatttactttctaatccggcatttttgttatttcttttgttgctcagattgttccagctttggccattgagagttatttcatcttggctcttgtatcctttggaaatgccgtccccccgcttttcttcacccccacttccatattttctggtattctggcattaccagaggctacagactcatcttctgtttcccctgccccagccttggaatcagccatttctctaaagagccctagttctttttattggaaaatggtattttaaaagcaagagctgggtactgagtgtgtatgttgttgctggagcgtcactgcttttagcactttcagagggcagagctagaaaacatacacacatgtaccaacccaggtgtacacacatctgttactgcatgtctatttgtatgtttattaaggcaagcataagttcattctgctatctcaaactcttaatctagcccctcggggttcatttccaaattcttgcttttgctttttgttgatggagtatgggcagtacagcagttaaacctggtttccatatttactttctgctgagtgctgtagctcattggtgagaaagggatcttttgacttgacttgcatggacacattctagtaggaaggttgtctgtcctcatcactcctgtgagtggtcctctagagctctttgaaatggctacaacattgcagatcaaaaacacctgcttttcaggtgcttcacttctcacctttcagatgggacatgcccagttgtgtcttctaaaccttgtttcagataattttaagagttgtcgcttcagtaactatctctaacacagggatcagcaaaccttttctgtgaagtgcagtaaatattttaggctttgcggaccataaggtatttgtttcaagtactcagctctgtctttgtcctgtgaaagcagccatagatggcacatgaacaaatgagtatggctatgtcttactaaaatttcatttacaaaaacaaggttttgtatttggcccgtgggccatggtttaccatccgttggacccattaagtatattctcctcctcttctttgtctcattctcactgcgttcataggcttgatacgttaacattcgtgcatcagtaaaagaatctggcttctagagaagaagggctgtccatgggcgtttgactcctaaatacagtttgtttatggtactagtgtggccacaaggctctgccacacaagctctgtctcttccttcctgttattacttctgcttcccttctcaggaacctgaaatcatatggtagtttgtttgtttaagtgatttttttttttgagatggagtctagctctgttgcccagtctggagtgcactgcaacctccacctcctgggttcaagcagttctcctgcctcagcctcccaagtagctggggctacaggtgcgcaccaccacgcctggcgcaccaccacgcctggctaaattttttttttttttaatagagatgggtttcaccatgttggctcaggtggtctcaaactgacttcaggtgatccacccgcctcagccaaagtgttgggattatagatgtgagccaccacgcccagcctttaagtgaatttttatttgagtataacatgcataacaagtttgtgtggatcataagtcttagaagtggatgaatttttgtagcaaggtttgaagagtctgtttttagatgagtttgctaaggtggcacagtatgtgatgattccgtgtaaagaagtcattgttacagggctgtgtcctctatctgaactggcatggttagtttagttgtttaaattgagggcctgcttacaattcatatctaagatttactggagaggagaaagggttgagtattcagtggcccagaatctgatatgggaattggtgaggtttatgttcaaggagccaaagaagatttaaattttatgtatttgaattactcagtgcgtctatatatatatatatttggtcatcttaaattttttttctcgttagaattcagttaaggccaatatttgaactttaataagttttggtacttgctacactgcagtacatttaattgtatgtaattatagggaaagactatgggaattgaagtcagaacacttggttataagtgcgaagtccactacttctttttaagatcttaggaaagtgatttaacctctttgggtgcaaatcctttatctgtgtattaaggaaaccatctgccttcctcaccttacaggttgttgaaagaatcagacaggacagatgtcctatttatagctctttaatgcatatgtaggcaagcagtggcagttctgtgactcttctctaacttacatatcatttacccaaacagcccttatcttccagccagcttggctgcttagccatattgaattactagtttctcttatctagaacaacttctgcccaactcatggtggacagaaccaagtgtcatgaagtgattttattcattcttgcattcagcactcttttcacaggcacctaccctgtgccagacactgttctaggcactaacatttcagcagtgaataaagtcagtccatcttctaccctcatggagcatataatcctgagggtaatgcaggcattaatttaaaaatatataaatataattgtagctatcatgagtgctggaaatacaatgcttcgatatgtgaatgtaaactagataggaagatttttttaaagaggcattccctagacagtggttggactaaggtagaagaaaagaatattccatgaaatgggaagaagcatggtcccatgagggattaataggccaccactgtgggcagagcagtgagggtgaggaaggctggtagctggctgggtatgcagggctcccagccatgagagggaggcttgtcttcaaagtggaagttaactcaagctgttggcactgtgaatttgacatgagcagattttaggtaaatgttaaggggcagttactaaaactagccttgtacatttttaagaacttcgaataaaagttattgcagctcaaatttgttataacctatttgttaaagagaggattgttttgagactatagttccattcttcatgaattggtaggagtttggagtttgtcagcaaacattctatcgggctaaaggtttttataatgaaagaaataggcaaagtggatcagtacactcacttttctaccattgaccctggagacagatggcttaaaatgttctgcgtctagttgacttttagatcttgaaattaaggtttaatgatgaccaagctttaaataaattgtagaaaagtattctttcaaaagtacattataacttttatattggtttcttatatttatttcttttaatcttttcttttaactcaaactacgttttaaggttttgttgcctactaagttataatctgagtgcagaaggaaacttgatttggctttatggaatacattttacattcagtgaagctgagctctgtttctcattccttacaaaaggaatcaaaggcattggtttgagagatcaagtcatgtgttaataaaacacaaatattccatcaagtaatactctgaaggagcaggtgtagtttatttcttctccagaaagtcttccagcagataaataatgagaggtagtatggcataggaaaaaagtacactgaagtcagcctttctggttcaaccagctcagacccctgagctatttttgcctcagttttacgccttggagaacaatgccttgtcattactattcactttatgaccatacagtgcctggcacctggtgggcaattggtgaatgttttcactatcctcatccttgccctcatgaaacactccttctaggtcccacaaagaccgttggtattttatgacaaagtaccttacaaatatttttctttttttaaaggagaaattgtcgtaaatgaagtcaattttgtgagaaaatgcattgcaacagacacaagccagtacgatttgtggggaaagctgatatgcagtaacttcaaaatctcctttattacagatgacccaatgccattacaggtgtgttttattagtacactgtttcattctatcaggctttcaactctaagtggtacatattattatataaaacataggtatggaaaagttatagtagaagtattaggtaatgcaatgtttgggataaattatattaagatttaaagtaaagtttaagaagaatgttggaacttgctagaggagtattagtgagaggattgtaagtcaccttgctttatttatcctctgtgatcgttcattatatgtccttttcattaaggaagttattccctctgttgcagatcttttaacctgcttataaaaatgacataaagagaaaaggttgtttgctaaatgattttataaatgccacacattttagtgatttcataggtttttttgttgttgggtttttgatttttttgttttgagcctggatctcgctctgtcttgtctcccaggctggagtgcagtggcatgatgtcggctcactgcaacctctgtctgcttcctgggctcaagctatcctgccacctcagcctcctgagtagctgggactacaggtgcatgccaccactcccggctaactgttgtatttttttgtagagatggggttttgttatgatgcccggattggtcttgaacttctgagcccaagcaatctgcctgcctccccctcccaaagtgccagagtacaggccactgcacccagctaccttttttttttttttttaaactaattagtgttattttcctaaaaagttaaattctaatttctaggaagagtgaagaatagtatcgatttaaaaattttcagtagccctcttgctattttatgttcttactggaaagtaatagttccatgtaattttggtttttagaagttcaggcattcatttgattaacttaaaaaccctggacttttctgtcagccattttgtattttgttttataaagtattatacacacttacccctagatctttctttatagtaattgttctttaatgaaatattggtatatgaactgtaaacttttaaatttaaggatctaatagtttagtgtaagtatatttcatgtagtcactcactaatttaccataattattatactgtacaaatatttattgtactgtatatttgtgtgttcattacagtcttatgtaggtatatttagactaaatttaaggcacttaaagatacccactgtgtagggacagtagcttatttggatataggcttgtgtgtttctctttgtttttagcttcataatgatcattggccccagacttcactgtaaatgagaagcagatacctggaacagcttaaatccagtaccactattaggaaaaagtaaaccagtgccctactgacagcagattgatagtgttaactacgtccttagtttgaacatgcaaaaccttttctaatggtttttatttctagtagactttgtgctttaaaaagatagttattttgcactttaaaatcttcagtgtgaaaatcaaacatgattttacccacttaaaatctgatgacctaagagcccttttttctttaatatgttgtggccagcttatccagatctagacatgcaaatgcttgctggtaaggtgattgatgatattccctatcttaggtattataataagattgttgtgtacattttaacctaatttctatctgtcaacattggaatggccctagctacctagacaaaagctttttgtgctttttagagataactgtcacagtttatcatcacagtttaaggcttatactaccattgtgagattattgggaaaagaattaatatgaacataattttttattccagaaattccattacagaaaccttcttcttggtgaacacgatgtccctttaacatgtattgagcaaattgtcacaggtacgtagtattccgtacatactctaaaagtcaattccactctggaagtattatttgaaaagtcatacctctcaaaatacttggattggcgttttatttctgtaagtttacttttgccgtttttttgagtcccgggaacataaagagggatatgttaataaattattttaaaaggaagatataaaatgtataacttttcatagtttctaggttttttgtcctctttttaattaaaattaatcattaaatgtgtctagatggtggttttatgcaaataatcatttaaaatatcttccaaagcaaagttaaaaccaacccccaagttctaggaattacaagtatgaaacattctagacaagcagagctcaaatgttgggtgaccttccaattattttcactaagaatttgtattaaagggtgagtaacaaataactgttacgcattttattttctctatttttttttcttttttagtaaacgaccacaagaggaagcagaaagtcctaggccccaaccagaaactgaaatttaatccaacagagttaattatttattgtaaagatttcagaattgtcagatttcgctttgatgaatcaggtcccgaaagtgctaaaaaggtaatactgttaaggtttatcaagttctgggttctgtactgtgtttactgatttcaattccgtatggcagttttcatttctcaattgctcagatgttttttaggggaagttatcagacatcttcttaagtaaagtcaaagccaagaatattaatagaactattttcttggattggtttatggctgttttaaagtgttctatataactttttatcagcttctcaaatattaaagactcttacgtggaaattagcatttttttacataaagatcattacttgtcagtttcttggttaaaaggttgaaaagttggtgatatactgtaattaaggtttggttaggcttttaattcagtactgcagaactttaccaacaaactgtaagctagacttatgttacataagatttaggtaaatatataattacgggaaaggcctagtaattattagtggtttaaagaaatattatgaattgagtgacactcaacaggggcaacacaaagctagtaactttttaactgccttatttttccacggccttccagataatgacttattaccctacttgtaagagtcaagggcatgttttccatgttttgctttgccagaggagtgaagctggtagacctaatatggcccccgttccagtctgtgctgcagcaaatgcagagtcacagactttccagtaggaagcttgcgcgtgtgtatgggaatagggcaacagtatcttagtataataggacgtggctttctctcagaatggaggcagtctttgcaccaccaagcaatgagtgcctttgttttccatggttagtcaactgactgcagtaaatcttctgttgataccaaaacaaggctggcaaaaatactgtaaggcagctgtcttcatatactttggtgaagaggtggtagatttgtttttagattgagaaccaacagtttcttcacaggaaggcaagcaggagatgaatatatgaaaatacatctgaaaatatgtgactgtctagcagagtagagtggttgtaggctcctctatgggtaaaagttttcaaatggtctgtataaccatctctcagcaagctgcattattgaaaattcaactagataactcttaaagcctctttcacctgttcgattgtgctgtttgtgattttggcattttactaatttaaagtgcctattatatagaaggactttagaattcatgatgtattagactgtacataaaatatttcagacaggttaattcctcaagcttatttatatttgtaatttaattgatcaaagcatcaaagacctgcttatgaaaaccttaagatgtgtagcatctcaagattagggacatcacagaacttgctagattgagttaggacagcatattcctaaggaagaaattgatgcaattgaccggatctctttcggaaagttcaattctccctcttttactgtatttttcagtttacactattttaatgagtggaaataataattatttggcctagttcttgaaccatctgtagtacttgttggtcatttttcatgttgaggcagtgtgctaaattttgcaagtagaaagaagggtaagatgcagtttcttgccctagagaacttaaatctagtgaagaagataaagcatgaacaaatgaaaagtaatggtacaaagtggcagcataaaatcaactacacaaatagttgatttccagatgaacagagcataataagtgctgtggaaattcagaatatcccctatgtgttgtgctgctggttcatgaagagggccttactaaaccgtctgcacaaaacaagccagtccctcatatgccctttcctaagaccaagtttcagacaaaaatcttttccccagtatcctaaaatataaaaagcatgtgagtctctgtcttttgtatagccacgggggttgcagggcaggggagggtgcaggaaaaaaaaatagatgcaatgagaatataaatagtttttttgggatttacgcatttcaaacagggttaagttgtatatggctaccaaagcttgacggctttgtgagttaaaaacaaaaattatggcatattcttttatttcaagtgaaaagttttcatctaaaattcggtagcagttaggaaattatggctcatttttacctcctggaagcttggaatactgttttctctggaaaatgctttgctattttatcagttgctttaaaatgatgaaatgcatgtttggagttctctggtgggtaaaccgttgattcattttgaaatacctaagccatttatgtttttgttttgaaaaatgaaattcaagaatactaaattggttcacattttgttaaatgttctgaacccttctggttgtcttgttggtgttgtttcaattgtattatgacaaaattagattgctttgggcacttgtactcattaatattcatcctcattatcctcgagctgtcacaggaaaatagtgatatttgggaaaggtctgtataaagaaagaaggaatttgatggtgcagaattggacatctaacctcatagcaacttagaaccaccattttcttttgcagaacctttgctcaaaactgaagggcaaaataataaaggttgtttttaatgatttatctatatatctgtctgtgtagataaagataaatatatagatacacatgagtgacaagtgaaatacatgccttttgtctccactttgttctctgattagtgggttgtgaatcacttcttcaggaatactttatagaagtgaattccattcatctgattaaggaacaagttggccttttcatgaactgtcatttttgacttgaatctggtactgttttttggtggctttcaggccacagaaataaaccacttttgtttgcaaatgagatagaacttaatgaggtttgagtgtttcctggatttgagtttcttcagtactgcaccccaggtgatcttaggaaagaaaccatccactgtgggtacttctggcttctgtccagagaagattatcagctttggtccaaaaattgatttaaaagtagtttacttctttttctccaataaaatatttgccataatttaatgtctttaataccaacattttcttcatttcctgtggtagccaggacaaatgaagtatttcagatctttcaaaaactcttaggatgaaaggtaggaatttggacttaggtttttaaaatagtgtgtatgtaaaagtgcaaagaatggggccctggctttctcttctcggagtgttccacagtaacaacatgaagacaatccaggtacacaagtttgtatgtgccttagtctgtgtgtccaaagaggcctcttacttaggtcatatgaacataagttatacacttgaaattcactactgaaaaacaatgtatttagttcgagttctgccaccccaaaaaaatcaacgagtaattcaactgacttgcagttttacaatatttttatagacttctttcagcgtagatgcttttggacatactcatttgtttcctaacctgatgtgatattgtgctatttttaaggggcttttaaaaaatacgctgtgttgggttttgccttgaaaataggctttatttcttttttgcctcatggccacaaaaaaaggatgtccatgatcaatgatctgtgaatttcttttctgtaaacagaaagagcatgtaactgctttctaattgttttggagaatgtgatagacattagtattattattattggcttggagcattttccttaatatgttggtaactacttttgtcagtgaatattagtgtagccactgttggacacagagcaccgtcagaaagctactgaagtggtgctgcaaagtgcagacatcttcagatctttactcaagtctgtgcagagaggtctttcttggtctccttctctactttttagcctgtctccctcttctcactgtaacacttcatattccccttccctgctctattatttttctcttttagcattcatagttatctaactttctgtattttttctctttatcttgtttagtgtctgtcttcccactagaatgtaagcttcatgaggacagggattagtgtctgttttgttcactgcatctctagggcttacaacattgtaggtactcagtaaatatttgttaaatcaatgtgaaatgtgtcatttatccttaaggaattgaccttcatggtagaagtgtaacagaaccacctatatcctacttttcatccacatcataactattatgtgaataccttggaagtaaagcaaaataagcacttaactaaagagacgctttatattgaaactgttgttctgggtttctggaattagtactctgaaattggctccctctaggaaggcttgtgaagagagtagtgttgaacagacatgacagtttccaagaaagcatagttggctaagaggagtaggattttccaagcaaagagtgtgacagtggagatggctggggctaagtcaggcagaatgtgttcaaacctgtttttctctgacctgagattgcggagggaatattgggaaggtatagttacctggtgaggagagccagttttgtgaagaatcaagaatgaggagatttaatttgttatgcagatgtctgggaaccacagcagattatcaggagagcaaaattgttagtcagaattacatcgttagaaggtaatccttaagttttgtagatttctagaatgtaaggaagctctcagaggtgccataaggtgagtatggcctaaggatgtggctatggcagtgtagcaaaatggacaactatgaaaaatgtctagagaaaagtgcaacatagcttatcaacggtgcccaaacaaataggaaggatgagaactttttcaagctacagatttcagtagttttgctgctagaaatgctttaaggaaaactgttaaaaagattaggaatgggaatatagataaccggctcctaaattttgcaagtgggaccgtcatagaaagctctcctataggtattgagaaatcgagataccacgtaagtttcaagaagcagttttttttttctttttggtcaaaactaatgacaaattctgtccccttgtttgtatattttaacttagtgagacaggaaacatttattctatagaagacttttaaaatgtagtttaaacaagttgacacatgcttactggttaatgaaatgtgcatcaacccactccaaacaccactaatttgacatgaactaacaattaacttttcttactcactgtcaaaagtatatcattctgccttaacttaacgctttaccttctaaataaaatttaatcttttaaataagtttttctgctatgttttccttgcatatgtcttaaatttcttctttcgtctttgctcactgaagagcattttctcccacattctagtgactaccagggtttgtaagcctagagcaccatccttcattctatctagcagcagttgagaataataacagccatatttctatatatggagctcctccaaaggcctagcctgcattaagcttgttaattcttaccacagcctaggtattacttttgttttacaagtgagcaaactgaggctagaaaagaggaaatgacttcacacatgttatgtagcaagtacttgacagagctaggattcaagccccctgatctgtttgattctaaagcccgcacgttttccaccacagggcacacagtcccaaaccattttacttaaacacagtttgtgtgtgtgtgtgtgtgtgtgtgtgtgtgtgtgtgtgtgtgttgtttttttgatgtacctctttgagccacccatgcatttttggagtttcttgctaattttaattttttgtaattatgtttctctatttagatgtttaaatccatgaggcgtaaactttaaagtttcatgccttatattaatcctttatagtccaccaaaaatgaaacttttttcttccttttttggagtggacatgtagtcactgcctttttggagaatgcttctttagtttgaagctttctttattggactaaaattactttccaattaaaatttaactcagcaaatatttactgaatacttgccatgtgctagctaaagataaacaatgtcttgagggcatgaaagtgaatgagatacctggccttaaggagctcttttatattctaggtcaacagaaaaacatgtaaatagtatctataatcactgccccaagatgatgctcccagtgcccaaggccttattgtacatttcatttaactaagtgtgttaaaatcaaattctaaatgtagaatttttcctaggtatgccttgcaatagctcattattcccagccaacagacctccagctactctttgcatttgaatatgttgggaaaaaataccacaattcaggtaaatatgaaaatattaaatattgtgactaattttacatgtgtaaattttactcttatgtttaccggaagcctccaagtacatgagctttaatgattgtagaattactagcttcataccttagagaagtaagcactacatgctaaaagagccaatagtttgtcagattatttcttgacaagttaccaggaagaacctttaatgctatgaatatgggcttataagttatgtcagatatttaatctccagtcactggcttgtattttatgatgaagaatatataacccaccctttttaattgatagcttgagttaaagtaatcttatcttttaagaaaactggcagaaaactaaaagatatattaaaagcataatcttttctggcaaggtgtgatttcatgcaaaagctaaagtgattaaaaactttttgtggacttcattaagattctcagaatactgagtttctatttctgagtaatactgatgaaaggaagatgagcatttttccaaggacaagtatattctagacagcttttgtgaaagtaaatagttttgtctatatatctgacagtcatgacatgaccagggaagattccagatgatcatgcaattctgtacattctgtttcgtacaaatgtaattttaataaacaatttttaaaaatatcttgatagagaaaaacaaagagccgtgtctcctgttagccccattgtcagttagtgactgcaagtcagttaactgagcgaagcctgtgttcttttatttaagcaagaaaaataaatcagctgtgtatttataatgaaaaatccattcacccagcatgctctgggccatacaaattattaattgtactgaaattttatattttgttaccacgaaacatggtagtaatttaaataactggcataataaaagtatattccagcaacactatattgtaaatacattaaaatgtatcagtgtacggtatctgaagatgcatgtgtataagtaaattttccttagtttaaaagataactacctttctgttaagcactgagaggaccaaaaaaaaaaaaaaaagaaaatacagtagagataatatatgaaaataatgctttgcagagcagcttttatcatacagtattatatttatagaaattgtataacaaaagtatttgtaacttaatttttcttatcgatatatacataattgtaactgaggcttaagcaatacagttattttttgaagtttattaatattaagtaaattcacttactgtctaaaaataaagtatacagatcctgcactattaggtaaacactccttgggatcatcgtcaagctacagaacagtgatcaaggttatcttcaataagatcctcacccagagttgcaagggttgtaggagtgagtctttgattcctgctcaactgtttatgatacagaccagttcttcatgctgctgtttttccaatagaaatgattcatttcagtttacagatccataacttctacagtaatgtagtgacttgggctcagcaaagacagtaaacttcattatacagttggtaacctgatgcctgcttcagttactttccacatttttcttcattcataccttgtgggcatctctggtttacagtactttagtttatccacccataggtcttctactactggaattttaaaatctacatcattcagttccactatttcttcttatatagcttattgataaaatttgatgattaatactgaaaatattcagggatgcttttttatattacatccttcagactcctcctttgacaagtacctcataaacataacactggccatagttttgttaagattcctcgtagggtaacatcctttaatatccttccatgctgttacagaagcataaatactgcatctttaagatcaaaaggagcctgaaatttccacacactgcagtcagaattcattaatttgtgagtgaaagatgcccactcatccactcttgaacttctggatgacaccttgattcattggctggattaaagaagtcctttttgcaggcaggtaggtgacaaagctgtttccacaaataagatccaaagttggaggagctcccctgcagttatctgagaaaatgatattttagctggccttagtcactcaggttttcattcatattcagtatcacatgaggaaaagccatctctgaaaggtcctgcagtcatcccaacacttctgtgaatatcctggagtaaagtaagatgtgtagcacccaggctttggaacatcgctttgcacaaacaccccaggagatattactagcacaaacaagaacaatgattctgttttttctcttttaactttaaagaaaccatgaggactctgttttcatcagtcagattattattgggcaaataacgtcaaaaaagtacagattcatctttcttatagaattgataagatgtcagattatgcttctggaccaaaaatattgaaagtttcatgaagttatctgcagcctagtgtcagcaactgcttcatgacagacatcctgcttacagatgctgtgatgtaatctgaagttgtaatgaaatttcacatcagaagttgtacattttcagtgacatttaattttatcctttttattaacatagatcttgttattagattttccttaaaatgcctatttgaaaaacacaaggtacacaatccatttgaaacagtataggaatttttaaactttgttgcttaagattctcagaatagctataaatgattgttgaatattggtggttccagccagctgtatacatcaggattactggaggaacctttagaaatgcagccatgttggctccagcacaggtcagaatctcccagttaagaaccactttgttgactcatgcttttgaactgattaatactcacagtcctctttttaccttattcctttgtgacttctaatttctgcagtatcatcagagtggtgggctttcttttcatatattgatgacttgtattttctgttgcttgaagccattctagatatcaattggccaattcagtggaaattatctaaaataaccccaacagtataggattagacttttgtactgtcacagaagatagccaaggtcaggagcatataatatctatttcacgcttagtctgctgtggaggcatgtcataaaacctcagtcaggtagcggtcagcggagccaggtctccctgagatgacccacctttcactgtgttggtccagcccctcatagcgatccactcatagagcaggccactggtatcaggtcttttgaactttggaaagcattcaaatttctggactataaaaccagattgagtatacattacacattctgtaatgagctctaactgaagatgatatagaacatataaaagacctagtcccagttgtttagaaaagtacaggatttgaacgagagaaatggcaaaaataacaaacgatagaggatctcactttatgcttagaaaatatagatgttctcattttacgtttagaaaaatttgtgtaagttagatcttgaaacaaaatttggccagagaaacaatctcataaacaatagcacattcttagcctagcttattaaagtctgcaacccaaaacactaaaaagtattcagtgctgctggactcagtcaccaaactgttttacataactgttaaaattttgagtgtgttttttataattcttttttggtggtggtggttttattgtttggctaggactgctggttcagtgttgaatagcagtaatattagcaggcataatttcacttcccgcttttaatgaagatgctcttagctatgtctttttgataaacaccctctatccagttaaggaaattcccttttattccaaacttgctaacgttgttgggtttttttttttaagtcataaacaggtatctatcatatgtttttctgcacttacagagctagtcattcatatagcctttttcgtgtttaatgtagtcatatgatgaattacttagattttctaatattgaatagctttctttgttttggtgcactggaacactgtatagattgggctttgccaaaaattccatatgcaggttttgtgttctggagagatcataactcctaagtcttccttctcacagacacgctttttagttgtgttactccagagaaggccctgagatggagtgggactctaggatgtgggcttagaatgagcattttactatctatctatctatctatctgtctgtctatctatctatctgtctatttatttttgagacagagtctcgctgtgtcgctcaggctggagtgcactggtacgatctcggctcactgcaagctctgcctgccaggttcacaccatctcctgcctcaccctcccaagtagctgggactacaggcacgtgccgccacacccggcttatttttttttttttagtatttttaatagagacagggtttcaccgtgttagccaagatggtctcgatctcctgaccttgtgatccgcccacctcggcctcccaaagtgttgggattacaggcatgagccaccgcgcccagcaacattttactttttaatgagctttgttaaaatcagaatcactggataattctgataccacttaagaggagtccaaattcctaacatagcccctccgtaatctagagcagcaccgtccagtgatggaagtagggcagccactagagccactagccacatgtggctgttaagtacttgaaatgtggctagtgcaactgatggactgaatttttaattttatttaattttcatttcagtttaaatttaaatgggcttgtgtggctagaagttacgtttttgggaaacatactagagtctaggccctatttgatttcccgcctctcttccaccacctgttgaatccctatgctctagctgtatttagttacttgatattatacagttataccatctttttaaagttcttctctgtctagcatgcctacctcctcctcaccagctacctggcaacttttgacttgttccttagaactctctttagttgtggtcaagtcatgaagcttttcctgccccggcctctctctgcagcgagagttaggggacttctcttttgcatcttcattgcactcagacatctggtactctgtgattatcacacttattaatgctctcaagatagagataaaatcttattcatctttttgctctcaggcattagcacatggggagttctcagaaaatacctgtcttataccaggaattaatgaataatcagtaggaatgagcatgacatgttcatgggacgttggagggtagtgcatggctgcagaggagaatgggaaatgaaggtcagataagttacgtgagggatctctaaggccaagagaagccatttaggtttgatttggttggaaaatgagcttattgaaagtttaaggcaagggactagcatcatgaacacatctttttagggaagtgtgtcttgtggtaagctgctggctggtttaaatgcagcagaatattccattggggatgccagctgggagacttgccacagttgcagcctgcagcagaaagaccctgggccagaatgggttgtgccatctgtcaccagatattgccaaggtagatctggctgactttgtgggacagcttgtttctcaataatcactttgcaggcactcttgaggctgtgagcatgctcccagaagatagcattacttctctctcagagcaggctcctttctaaggaaatgcaagtctaggcctgccctgctgtaatcttcatgtggaaacagcactctagcaaagaacaaggaacctgatgagcttttcaaaggaaaatcgagtagatacaggaaaccaagaattttctaatgagcagatagaaaagagcaggtaggtgagaagttggtattagaaaaattaaagatttgaagggcttgaggacagagatgattgttggatgtttcatttttccaggcaaaatatgtggagcaaataatcaaatgacatggacttaccccacaattagggacggagatgaggaagggttaggaatagtttctgttagaatggtagggatggaagacaattgaaaattaaagagaaaataaatggagaggaaatctaggcagcagccattcttcattctgggggaaggtggtcaggaaaaggaaggaagaaaaatgtatagcatagtagctagagtggtccggcgtgatcaaagtgttttcaatatcatgttgactgacctgtttacgtttgaaggcagagaagatagagccagtagaaggagagaaaaatcaaagctgttttacggagttgtgaaagagctggataaggacaagactaaatgagttatttttaggccaggcgtggtggctcatgcctgtaatcccagcactttgggaggccaaggcaggtggggcacctgaggtcaggagttcaagagcagcctagccaacatggtgaaaccctgtctctattaaaaatacaaaaattagctggacatggtgcatggtggcaggtgcctgtaatcccagctactcaagaggctgaggcaggagaatagcttgaacccggggggcggaggttgcagtcagccgagatcatgccagtgcattccagcctgggcgacagaacgagactccgtcaaaaaaaaaaaaaggagttatttttaaatggaaagggcaagacagttctcggagagacttggaaggtgaagcaggttagagacagcacatcagagtatgcatgtgacaggaggctcagagaagagggaatgctggggaaaatgtgactgttaaaattcataatgttgctttttcctacagcaaacaaaattaatggaattccctcaggagatggaggaggaggaggaggaggaggtaatggagctggtggtggcagcagccagaaaactccactctttgaaacttactcggattgggacagagaaatcaagaggacaggtgcttccgggtggagagtttgttctattaacgagggttacatgatatccacttggtaagtacaattttagcaatgttatatatggctggaagtcacttccctatgaataatcatcaaactctgttgtcattgatgactttcaagttgtggttaatggaatatttgtttttaataatgttttaataaatattttattttaaagatcaaggcttattaatataaattacggtatcccttaaaagaagttgatagtaattccttactgtcatcagtagtcagtgtttattgcattatatcttgtaactggtgttttacagttggtttgttcatatcaggatctaaagtcttcacattgaatttgcttaatatgtctcttaggccttttaatctacaacagtctcctcccacctcttttttacctactatttgttgacaaaccaggtcatttgttccctagaattttccacattgtagatattgcttgttttatccccagggtgtcccgtaatgtgttcctctgtctctaatatttcctttaaaatgttagcaacagaggcttaatcggattcaggttcagtacttttggcaagaatgtttcattaggtggttctgtgttctcctgtggagtcacatcccatctcaggctggctgggctgtgtctctctcattgtaatcctgacgaccagtgggcttagagggtgtcaacctgatccacccagtaaaagttcccctcttatatcatggtttgagctcccaaaaatagttttgcactgggagggaggatcattgctcagatcgttatttcactaaggattgctattgttcaccttctaattctatcatctttctgcttttatcgaacttttctctcaccagctctttagtgccctgtaacacagttcgtacaagaaaagcaatataaatatctacattttctcctttacttaacatttttccaaatagtgagctggttccctaggggatcttctagaagtgactaggaatttgtttttttaatttgtttaatgtcatttagttattatgaattttttggaatgccttattttaaggtcattgaagtcctcattagttcacgcacataagcagctttttagaaaaaggaagaaaagcactactgtgttattactggttaatccagtaccaggaacttctagtacagttctagaaaggtgctttgcagcatgtagcttgtatcttttgcttcccctggaatttaagcttcaaggccagcacactctggtatatgtgctgagaaacatgtgatggggctgcccagccacgtcggggaaagaaggaagatgtcttgaggtgcagtgagcttgcccactagtaattattgtctgatcagtgtcctagagtctgactgtgccttttaggcatggggaaaggtagaagagggacttaagaagagagctaaagctcctggtagatttgtggggttttcttttgtttgcctggtgtccttaaccatagcctgtcaagagaacaaaggtggatatatttttcagtgaacacatacatgtttaatagtcattctggaaaatatttctaataccttctttggaattttctcatgctataaatttagatttttaagaattggtcatatcgcaccaattttagactaagaggtgtaggatcgtcactgcccccccatggtgcccaccatgtggctactaagtggggtgcacattaaatgcggacaacttgcttaattatttatagggtctgcaggagcacactattcctgcttttagcacagcactcatataattttttttttcccctccagccttccagaatacattgtagtgccaagttctttagcagaccaagatctaaagatcttttcccattcttttgttgggagaaggatgccagtaagtgatttctgttggattttatgaatgctgacgtccattgtttctacacagtgaagtaaggattctacctctcccctagctctggtgctggagccactctaacggcagtgctcttgtgcgaatggccctcatcaaagacgtgctgcagcagaggaagattgaccagaggtaattgagaaatggtcattgtcactttagatagttttacttgttgtgtaactacagtgagttccctactaattgaaaataacaaaatgcatagtcttactaattagttagcaccatgttttatataagaattgccattttgaaaagaatgtgataatattaaaattaactgacattggagttacactaaatataatttaattatttggtttgtaagacacttgtggatcttacattgctgacatcttgctatagcatttcctataacatactttcaaagtgcagtgatatccagttgagacacttcaggataaatcaaacttttcttgtagtttgatgtgtcttatttaggtctacacatttgcaatagctagaacagtggttttaattagccaccacagacgagtctggcatcatctgctgtggtcattagtaacctccacgtcattaaagtaggaggcctttctcagttgtgctcatagcagtgagcaatactattgatcactctctccttaaacccgcctgggccctcagcctctgctcctctccactctcctgaagctcctcttcctcactggcactccgtgccttctgcagacccatcctcttctctccagacattacacagattctaaggccgcttcctcatgttctgtattcttttcctaaagaagtttccccaagaatgtggctttagtgaccaacacatttatatcttcagtctaccttgacttctacatggaggtctcaaagaccccttaaactcattatgtccaaaaccaaactcaaggatatggcctccatgccctcccccagcctgctctcagaaaccggggggtcatcctggatgccttcctctttctttcccttccccatcaccaatccctcctcaggttttctcacttcacttttcagacaccttgcaaacccatgtgcttccacaaacccagctccacctctgcctgtgtgttataagtgctatcatttcctccttccatgtctcctccacccctgggctccagccccctggactttccctggtgttttcaacctcctgacattgtccagcgctcttcccttctggactgccttctttgcactcatctgggaacactctccacgcttacccacttggcactccttgtttctttttttttgagacagagtctcactctgtcacccatgctggagtgcagtggtacgatctcggctcccgggttcaagtgattatcatgcctcagcctcctgagtagctgggattacaggcacccaccaccacatccagctgatttttgtatttttaatagagacaagatttcaccatgtcggccaggctggtctcgaactcctgacctcaggtgatccacccgcctcggcctaccgaagtgctgggattacaggcgtgagccactgcacccggctcactcattctttatatctcaattcaaacatcatttcctcaagataagccttctctcccctctaaagtttgatcagacctcaaaagtctatgttcttagagctcctgagtttttaacatttatttcagtttttaattatatatgtgtgtgttacagtttgattaccgcctgtcgtttttactccatgagatgagggactatgtctgttttgcacaccgttatatatttagcacccaggaagcatatatgatatttattcaatacttgttgaataaatgaggagtaaatgaacagatcttataaaacaggcttatggagcctcagaaattgtgtatcacagtcctttttggtacagccagagtgtagggtttttccactgtaccgtaactgacagagccatattcactgaagcaaataaccatcaagtgaccctcaaatgaccttcagttttctggaaaggaaggtgactatagttcacacgagtccgtattctctgtggattttgatttacctgaactccatttggaattaactgtctgctgtgtcatactccaagccttgttttcattagcatacatgctgatgaagtgcacagttaggaattttgctgttaaagggacaattgtagcattgttgggtgagagttagttataaaaccttataatcagtggcagtttcagtgatttattaagctgaaaattactttaatgccttttgtgttttcagctatcctattcttcataagtagaacagatcctcttttttgtccaacctcgtctcctaacctttttccctcaggtgtgtcatctagccccactggccttctttaggtttctcagcagccatgcttgttacctgccacagggcccttgcactagctgccctctgcctagaacattttcaccccagatctttacattgcttctctattcatttaggtttcggcttcagtaccatcttcacagagcagctgtttttcaccatgtgacctaaagtagcctgtaatctcatgattacatcatccatggcattcaccacagcccatttatcttatcatctaccccaccccacgaagaatgtcaaccccccacttgcttgggcaacaccagtagtaaaattggaatgatacagggaaggttagcatagcccttgcacaaagatgacatgcaggttcatgacacattacatattttaatgaaatgggagcatattcttgttatttaatttttaaaaatcagtttatcaagcaaatgtacagcgccattttatttttcatgcctacattaaattccatacacataaaggtgcatagaggaaacctagaaagattgcaccaaaattttagaattctgagtgattttgtttttcttatcttttctaggtgtttttaaacattccacactaatttatattactttttctattcaggaaaaaaaaaaacaacagcagggttttgttttgtttttttaaagtggtgtggaagttacccattgaatatagatgggaatcccagtcctggctgtttcctttgaaaagatctagagaccccatggcacatatttatagtagcccattctctcctaagaatagaggaagggtgggaggaattttggtgaatgtctgtacttgcagtttatcctacagcaaatcgttaagactgtgggaataggtgctttgcattctctagagctggagaatgtgcatctggtttgccatccttctgtctacatcatgtggaaagatgtgggagtgtagggtctccttaatctaaatgcagtgctgccccgccccccccttggcagtgtttctgtttcccaggcaagtgttccaatggatgtgctttattttctcccatcagaaataagggaatgagcccgggcgcggtggctcacgcctgtaatcccagcactttgggaggccaaggggggtgaatcacaaggtcaggagtttgagaccagcctggccaacatggtgaaaccccgcctctactaaaaatacagaaatttagccaggtgtggtggcgggtgcctgtaatcccaactactcgggagggtgaggcaggagaatcgcttgaacccgggagggggaggttgcagtgagccgagatggtgccactgcactccagcctgggcgacagtatgagactccgtctcaaaaagaaaaagaaggaaatgatctaatttgttctgtgcactgcacgtgggggtggcagtgaggtgaatggcagcattctgcagtagtcaaagccagatgggtgggagaagttgggtgctaagagggaaacaaagtttacctgtcttctccttgatttcactctcagttttatgagaatacagaaaaatcatgcagagaaacctgatggaatagtctctaaaactaaaaaataagataagcaatggttctgtcttaaaaaaaaaaaagtaaactccatgaaggcagagaccttacctgtctcattcctctctctatcccctggtctatagtaagggttaaataaatatatgctgaaatgaatgagtaatgactaaagtatttttgtctttattaggatttgtaatgcaataactaaaagtcacccacagagaagtgatgtttacaaatcagatttggataagaccttgcctaatattcaagaagtacaggcagcatttgtaaaactgaagcagctatgcgttaatggtaatttcattcttatttcatatatataatgaacacaggatacagagttgcatgagatgtcaggaaaagtgatgttcttaaaaatgtagaaatagatatatttaaggagtctatggaactatttgtacaaattatatattattgtatgagaacttcagaacctcctaaggaattaagtttaaactactttttgttttagagggggaaaaatgagtgtattaaatttccttcagatgatgaaaggtataggagaatacttttataaaagcatttgctgagtagaacactgtattaccttacagacaaacttattaagattgtaatacatacagttatactttgagataggtgacttgacatgggtatcaaacagctgtgttatatctgtagcatcagaattctgatatatctgagcaaacgtaccaggtggctttcatgtgtcctgcgggatgagtcacatgaaagcatctttggtgtaatgtgggtcctcctcaagagatcctctaagtcaccagggagtcagcaaaggcagccttgcagcagatcttgagcaatgagtaagcacttccctgggggagggccttgcaggggcggggcaggggcaagttgttgaaaaaactagtgtcctgaatgattatgtgcactctgggcagggcagtgaggatgcctgtcctcatgcagtggctagccctcggccacgtgagccatgcacagaggcaccactggcagcaggggtggggcagggaagcaggagggcaaggcttgcagtgagaaagccaagggctagggcctgggcagctgacctcacaggtcaggagggccaggatcaaggcataggctgagcagggacggctggaattcttagctgttgggagtcagagttggttggactccaagatttccctgaaagagcgagagagaagatgatggagccccaggggaatgctttgttttgctttgttacagaattgtaatgtcttcttaaatgcttattccatgttattaaagtgaaaatgcatgatatttacttaaagctaacttttaaatattagaaactgatgtatctctttactctgatagggatcgtataaaataaaaagtaaaaatgtgtatgtatataatttattacagagccttttgaagaaactgaagagaaatggttatcttcactggaaaatactcgatggttagaatatgtaaggtttgtacttctttactttcttttcctttaactttttattttgagataactacagactcactggaggtacaaaaatagcacagagggccatgtacttactcttcatccaacttcccccaatagtaacatctcgtaactagagtacagcatccaaaccaggaagctgacactgggacactggatagctcttactcaccagttcatacatgctgtcgtctgtgtgcatgcccttaacacagctgtgcgattttatcacgtgtgtaggttcacgtaaccaccaccacagggagatacagacctgttccatgacaaggctcccctgtgctagccttcttataggtgcaccctcatcgccatctgtgtctgttgactaccactaatctcttctcaatctctatagttttgtcataagtcaaccccttccttttcataaagggtttatgaatttccctgatgaaaaagtacaaaatgaggccaggcgtggtggctcatgcctgtaatcccagcactttgggaggccaaggcgggtggctcacctgaggtcaggagttcaagaccagcctggccaacatggtgaaaccttgtctctgctaaaaatacaaaaattagccaagcatggtggcacgcacctgtagtcccagctactcaggaggctgaggcaggagaatcacttgaacctgggaggcagaggttgcattgagtcaagatcacgccactgcactgcagcctgggtgatagagcaagtctccatctcaaaaaaaaaaatttacaaagtggggccggttgtggtagctcatgccagtaattccaaagctctggggaggaagatcacttgaggccagtagttcacaaccagcctgagcaacacagtgagaccccatctccacaaaaaagttggaaactagccaggcatggtggcatgtgcctgctgtcctagggagcctgaggcaggaggatcacttgaggccaggagttcacaaccagccgaggaacatagtgagatgcccatctccacaaaaaaattttaaaactaggcaggcatggtggctcgtgcctgtggtcctagctgctcaggaggtggaggcaggaggatcacttgaggccaggagttcagggttacaatgagctgtgatatgccactgcactctagtgtgggtgacaaaatgagagcctgtctcttaaaaagaaaacaaaaattacaaaatatactcctttgagaaatcgtataagtaactaaagaaactttacggtaatgcgaaagctatgtgcattcagtagaaagcagtcaatcctctcttgtgatgctgagtagcagcagggagccacagctgccagtcagccacacagtctcagtttagggtattttcagcttacagtgggttatcatgggtcatgagttatgggaatatcatgatcagagagcatctgtaaagtgagaaattagatttgcttgatttcaagtactttatgtatttgtagtggaaatttgatttttaacactgcttttccttttctctcttcagggcattccttaagcattcagcagaacttgtatacatgctagaaagcaaacatctctctgtagtcctacaaggtaactaaagtaactcctgaaagcaccatgaccaccataccagccagccttggtttactgcttgtccccattcaagtaaatcacatcagttttagctatttcttatttactacagtaccatcaaatacattacagattttgcacatcatttgagtaaaacagtggcacaggctgggcgcagtggctgaagcctgtaatcccagactttgggaggtcgaggcgggcggatcacttgaggtcagaagtttgagatcagcctggccaacgtggtgaaaccttgtctctactaaaaatacaaaaattagtcaggagtggtggtgtgcgcctgtagtctcagctactcgggaggccgaggcaggagtatcacttgaacctaggaggcggaggttgcagtgagcagagatcgcaccactgcactccagcctgggcaacacagcaagactcaaaaaaaaaataaataaaaaccagtggcacaaggactgcaaatagaagaatagaaagtagtccagtttttaccctttattaaattatccttcctattttatgggaagggtgggtcccatcccctaatggattaatacttagtgttaattttgacagggcattctctctctgtaattttgctgtctaatttgtacaaatttgttttagtttaaataccttctggctcatgctagattatgactctaaggaagcagtttgagatgaagaaatttagactgaactgctgaatagctagtaatgtaatatttggtaggaataaacggtgatgtaaaaatctttcagttaagcaaaggataattacatattaaataacttacagctaatagaatttgtaagtttgcagataaagttcaatagactaaaaactaccttcgtataatacagtagtaggtcctttgtacccatggcttccccatctgtggtcaaccaacccaggactgaaaatattggcgggggaaagctttggccgtaatgaacatgaacagactttttttttgttgtcattattctctaaacagtatagtataacaactgtttacatagcatttacattgtattaggtgttataagtaatctagaggtaacttaaagtgtacaggaggatgtgcataggttatatgcaaatattaacatcattttatatccaggacttaagcatttgtggatcttggtatccaaaggaggccctggaatgagttccccatggatactgagggaagactatatactcatgttgcatagtatatgaatacaaaatgttgcttaagcttgcagaagtactttttttttttttgagatggagtttcgctcctgtcacctaggctggagtgcagtggaacgatctcagctcactgcaacctccacctcctgggttcaagcgattctcctgcttcagcctcccaagtagctgggattacaagcatgcaccaccacgcccggctaatttttgtatttttactagagatggggtttcaccttgttggccaggctgctctcgaactcctgccctcaggtggtctgcccacctcagcctcccaaagtgctaggattataggcgtgagccaccgtgcctggccaggcttgcagaagtacatttaacaactgccaaacttgattgactttaacaaggcaaaaatctttaagactcttagaaaaaaatcaaatagtaatgtgtcatataaagtaatcctgaactgatacagtcagagtgtgtgtttaactcacaaatgcatgcagagcctaataatcacaatttctctcatccagtgggtgttctcatcgtattggagaaccctactcatcctccatttctccatgcatttgtaatagaaaaggcctcagaagtagcactgaaccttcattttactagcatttttatatacgtttatttttaaacagtttgttaaaaatttacatactatggaattcacccatttttaatttgtaattcagtaaattttagtaaatatacagagtctagttttggaaatttttcatcaccccaaaagtcccagctccaggcagccactaatctttctgtctctagattttccctttctgggcatttcatataaatggaatcatacaatatgtggccttttgccgctggcttctttcattcaacatacatgtttttgaggttcattcatgtagtgtgtatcagcaatcttttcctttttatttctgaattgtattccactgtttgtaaatgcattttgcttacccatttacctgttgatggacatttgggttgtttccactttgtggctgttatgaattatgctgcttcatttatttagatctttcattttatcagcagtgttttattatgtaagtcttatatttattttgttaaatctcttaagtattttatttttatgtcactgtgaatataattgttaatttcattttcaggtttactatgtactcagattgttgtgtacagaatttctgtaaccttactgacctcatttattaattctagtagttattttgtggattccgtaggagtttttacatacaggatcatattgtcttcaaagacagtttttacctttttctttctgatctgaatgccttttattttctttttcttgcctaattgctctggctagattctccagttcaatgagatggagaagtgtagagaacagacatccttatcatcttcctgatcttagggagagagtatccagtctttcaccagtgaaatgggaataacattaattgtaggtttttgtggatgtctctgatcagtttaaatatgtttacttttattcctaatcaggaatgaaggtagaattgtatcagatgctttttccgcatctaatgagataatcgtgttggttttgtcctttattactgtggtacgttactacaattgacagatgttaaaccaactttgcattcctggataatttggtttactcatatttttattgatttttacatctgtaatcataagggatattggtcaatagttgtcttctgatttccctggctgactttgatagcgtggcaattctggccttattggaaaggacaacaactataaaagacaggagggaatcgtttgccacagcttcagttggtagtgaacagtcccactctccccattcacttctcagtattgccatgtggcctgtcagtagaaagattaccttatacttaataccttgacaaaagagcagtagaatggagtctagacggattttctaccacaaaccattcgaatgtaaaaagtatgagtgatgagcttctattatctggcaaatatccatgtataaaagaccatctcctattaaatgctaatttagtttatctacaagtctgtaatattttagagttgctggaatccagtaaaatttccttatacagatttggaaggcagcctaggtgtgcagaatactaaattatctagtttacctttccttccctttctctctcagcatttttctatgttgtaatcattttctttccattttattaacagaggaggaaggaagagacttgagctgttgtgtagcttctcttgttcaagtgatgctggatccctattttaggacaattactggatttcagagtctgatacagaaggagtgggtcatggcaggatatcagtttctagacagatgcaaccatctaaagagatcagagaaagaggtaacaaaatcttgatgcctttttatcagtctttaaggatacacaaaataaaatttgtgtcattaaaagatgaaggggcttttaaaaaatactgtatttagtacaacttaatttccttagtccaaagctaactaatggattagagttcaaattgatgtacttattataaagattatcgtaactatgaaggtgaaatttttaaaagttgtctattgaatttgtctaagtggaaaactactgaaaaaattctgaataaaatactgaaaaacagataacaagcacattggctattttgaaaaatcacttttggaatatcatattttcttaaaatgggatacataggttaagatgaaaagtttgagagggccacctttgcaacagctgtggagttagtggctgcctcggatctctagttaggctgcggaaggccttacaaatatcttaccggccaggcaggtcagtcagatcagtttttagaaggttgtttcagagagcgccatttgacttgtggtgtctcataaaaaatagtggtcacccgctactgcacttggggacacaccacgtgacctaggctcatcccaaagtgttttctgaaatatggggatgttttctggatgctgagcctacaggatcaaccaaacattagagaagtttggttgatggttttgttttgttatataatctaaagaattgtttctaagacatgcttaaacacatattttgctcttcccccttcatatagtggcaacccgctcaactgtgtgctttgctgtttcaacttgttacatgtactgggcaaataagggttgtgatgtttatcacggttgaatgttacttcttgggtttgatagatgtgtatagctcagcttagaaggcaagtgttttaggcttcgatgttttctcattcatctcttctttaacatcagcagtacattttgaagtaaatgtgaacggctgaaggataacattaaatgatcccattgtctctttgtatttgccagtctcctttatttttgctattcttggatgccacctggcagctgttagaacaatatcctgcagcttttgagttctccgaaacctacctggcagtgttgtatgacagcacccggatctcactgtttggcaccttcctgttcaactcccctcaccagcgagtgaagcaaagcacggtaagcaaccctgtggctgtggctacgttttccctgtttttacaactttatcgaggcataattgaagtataattcactgcctatttaaaatcttatgatttaaaattcttactgccattttcagctgaaatttctgaatggattattttgaagacacaaaaatctaggaaattatttttatgaatgaacattttttgttttactctaatgtaaatgttttgtagtaaacccctttaaagatgtaaattactttaaccaccttaaatgtcatgcttttgtatttatatttcacatttgggctattgggtagtaaaaaacaaaagccctgttacacgacatttatttcctaggtcagtaggataaaaagttgtacaaaacaagattattttccttcacgagtttgaagtttctggtcacaattcattgatgtagaggatttatgactaagcagggtctcaagccaaacttgaaaccattctgaaccaaagtgccatttcacccacctcgaaccaacaacagaagctgacaaatgccgtggagaccattgagagaaacagaaaggggcagctcttgtggaccttcaggaagcctttctaggaagaggattgccctcatagtgagctccggggtcttcagcctcagccgtaaggccctgggctaggcagtgtgacctagggagcgggaaacctgagttctggccctggtctgggaaaagtgctaggcccatgttccactcaggcttcagcctgagagtccaggttgctaacctgtaaaatggatctgtcaaactaacacttatgcctttagtctcattgtatgaggtgaaacattttgtaaactgtgaatcattatgcaaattttcctaaagacatatgaattattctggatttgttggtataaaagacaaaacacactggtcagttaaggagctgattttatttaggctattgcaggagggagaacttaattaatgggcatcccaaagaaaaggacaaggcctgggattttatagtcagaagacaggggaatcaggagggagggcagtctcagtccacaggagccagttctcaggacacaaaaggcaggagagattgtccagcattgccacttttggggaacccagggctcaaagaaactcaacaccgtcagcctgtctctacaaaaaatacaaaaattagccagacatggtggtgcgcacctgtggtcccagctactggggaggctgaggtgggaggatggcttaagcccaggaggcagagattgcagtgagctgagactgtgccactgcactccagcctgggtgatagagccagagtctgtcccctgcccaccccaccaggaaagtttgacctttccagatactgtgctgagaaccagtgatacaggcttagaggctcctgaggcatggaacgctcatttgttcctaaaatacatgctctcccagttgcttgtttttatttttcgtcaccataatcattcttggggcccctctctgcctcgagctaggctttccccctggccttgtttgcctccttcagctcttccccattgtctcccgtcactaccccgtgcgcacacagtgtgagcctgcaaaaggtgcgtgaggcgaggacaaagactttggggtctggggactgggcagtgcatgggtgggtatctgcgtggaggactcccagcccccagacaccactgcctctgctgcttggctgatgctgtgtgtgcggacagacttctcaccaggaatgaacattactgaattgtattgagggagctgtaaaaaatactttctacaagtatttcctctgctttccctgttcatgttctagtgctctttttaatttggctctttcaaaagccttttctgacaaatactaacatgaatccccctctcccttcctccctagcaggaactggtcattgtctaagggtcgtgattcttaaccgttctcagccccttccacacaggcaaaagcccaaagcatttcttccttttttttccattctgaggccaccttaggtgctagtggccaggtagtgtttatagaaaatctggtctctcttgggataaatatttttaatttttaccttttaaaaaagagaacatctttttttttttttttaagacagtttggctctgtcacccaggctggagtacagtggtacaatatcagctcactgcaacctctgcctcctgggtccaagcactgctctcgcctcaaccacctgagtagctaggactgcaggcgcatgccaccacgcctagctaatttttgtatttttttgtagagtcagggtttcgccatgttgcccagtctggtcttgaactcctggactcaagcaatccgcccacctcagcttcccaaagtactgggattacaggcgtgagccaccgtgcttggccaagaggacattttctatatacttactgaagggccattaaaacacgtttgggttcatgttttactagatttcagctcttaacagtgtttgaagcaaatggattgtttttaatccatgtacatgatgaaatgtcaagtaactaaaatttttttttttttttttttgagacagagtcttgctctatcacccaggctggagcacagtggcatgatctcggctcactgcaacctctgccttccaggttcaggtgattctcctgccacagcctcccgagtagctgggactacaggtgcacaccaccatgcctggctaatttttgtatttttagtagagacggggtttcaccatattggccaggctggtcttgaactcctgacctcgtgatccgcctgccttcggcctcccaaagtgctgggattacaggcatgagtcaccactgcgcctggccaaaactgttaagagtatgtgtatttggtgcttaatgaatttttacttatttgaaatagaaaattttgtaaaactttacaaaatgccctgtgctgttacacagcttagccatttcttgatgattcaagccgccactgtgccagggaatgccacctggctgtgatgtagtcatggcctcctgactgctatattcttgtcctaataacattcattgtttgcctttttaataatttccaaataaattcttgggggtttttttttggtagaaaatttggagagtactgaaaggtacagaacaaagaatcagacatttcccatcatccagcgactttgtgtctggagttatttcctccagcgaactgttgtgtatacactgctgtggtagcctgctgccatcaatcagctgagatgagagtcctttctccacattgctaaatgtgactgtgcttcatagaaatggtctgggctgccttccagaggagctccatgtcttcctcacaatgcggtggttggctgtcaccctgtagccttgtgttgcctcagtttactgtggtgggaagccagataactaggctgcacccgcccagagtccgggctagaggtggactcctgtgaaggaggggtctcctgtgtacatggtctccatggttttagccacatgctaggaccacagggagttgatcccttccttcctaccctgagtctgtggtctgtgatttgagatcactggctcagtgaagtgtagctccccacttacgaagtaagttataaaattggtggcagtgatttccatccaaagattttgttaatccacttaccaacaggtaactacttaaatgtactgaccgtgtgctcataaaagtaaaatactgtaattatagaaataaattcaacatgtttaagactttctagtatcatgttagtgaaacttctcttaataacattcttattgcccaaagggcacggcttccttggggtcctaaggcagagggcacctgaaaagcacactccttgttcatggggactgtggggccctctgagctcaaaggccaggagcgtctcctctcttgaagtgaaagtgccactctggtgggttttgagggctgcagtacagaacatttaacctgtgtaatgatgagtggctcatctgaaaaaaggcattcatgagagaatctttagttttgcaaatatttatttatttattttgcaggaatttgctataagcaaaaacatccaattgggtgatgagaagggcttaaaattcccctctgtttgggactggtctctccagtttacagcaaaggatcgcacccttttccataaccccttctacattggaaagagcacaccttgtatacagaatggctccgtgaagtcttttaaacggacaaaggtaaatcacagctaacaaaacgtgatgttggctcacacgtaaccaaacacctctttttcagaacagagagcgttaaaagtaaaggcacttccaagagtaacactgctaatgcgggtttctgaggggtcattccctttttaactcaaatgactgtatcccagctttcttcctggtgtctgaggcccacaaagtctcagtacctgagagtgggcagattgcagctttgagcctgcaagcctgatttactaaagccccatttatccatttcttgatgattcaagccgccactgtggcagggaatgccgcctggctgtgatgtagtcatggcctcctgactgctatattcttgtcctaataacattcattgtttgcctttttaataattcccaaataaattcttgggattttttttggtagaaaatttgcagactactgaaaggtacagaacaaagaatcagacatttggcctcctgactgcctctgttcagtttgccattgttcttgatagaatcggccaggtctagtgttttttctagcccgtcttagaacttatccttaagcaaattagtggataggaggtactctcatcccgcccccattcaggctgatagtaacagcctaggtagagtcaacacataaaaaagtgtaattccaggggaggaggattagaataaggacacaaaggaagggaggaaaatgttctttgaggctgaaattccattaatttttcatagtattgagtttatatttgccattgcatccttcaatctttctaaaaagggaatccccggaacataataaaatctcttctgtatagaaaagctacagctccacactaagaggaatgccgtctgccttaaagaatggaatcatcagtgaccaagaattacttccaaggagaaattcattgatattaaaaccaaagccagatccagctcagcaaaccgacagccagaacagtgatacggagcagtattttagagaatggttttccaaacccgccaacctgcacggtgttattctgccacgtgtctctggaacacacataaaactgtggaaactgtgctacttccgctgggttcccgaggcccagatcagcctgggtggctccatcacagcctttcacaagctctccctcctggctgatgaagtcgacgtactgagcaggatgctgcggcaacagcgcagtggccccctggaggcctgctatggggagctgggccagagcaggatgtacttcaacgccagcggccctcaccacaccgacacctcggggacaccggagtttctctcctcctcatttccattttctcctgtagggaatctgtgcagacgaagcattttaggaacaccattaagcaaatttttaagtggggccaaaatatggttgtctactgagacattagcaaatgaagactaaaatagggtgttttctgaacattttgagggaagctgtcaacttttttcctctgaattaacattgctaacctaggcgtttgaatctctaataactttatatgtaagaataatagttggaatttgcactaatatttaaaaacatgttgaatcatgcttctttcacacttattttaagagagatgtaaattttgttcctgtcctctttctgtcattacaggtctggctcttgtaaccgtgatcaaactgttcatgttgtctgctacatttttgtctccatccatttttcctaccacctcctgaaggctatctgatagtcagtcacattagcagccccaggcagcagacaacaggaaagttaggaaatttgtgtttcgtgtcatttttaggagcatctgataaaacctccagcaggttttaggaagtattcatgtatttttctggttactttctgtcgtctctaattgaactcacctgatgaaggttcagtgttctggggccagaatttatgattttagatcaccttctttggaaccttagatcactgtgttttgaaatcatgagtttgcttttaacttcatagggtcaactttaaaatgatatgcactgttaattttaaagcatttgctgcagataattaaacttagaagtgcctttgactttaggatacaaatattacagaagaaaatataatttcactttttaaaattggggtgggaaaatcccattgcatatttgaaataggcttttcatactaagcttcatagccaggagtccccagagtcttgttcctctgaaagccactggggagtggcctctggggtgctgattccacagaggtgtatgctgtagacaggagagtgccatctatgccaaaactcgccctcaaaaacaaacaaggcttgctgggaggcgtgctgggcttggccatcagtatttccagtgtggtaaactattgctggcacttccccctggaaataactaatgaggttacgagttgggcacctgcacagatgtccttctctcatagttcctaatgcttaggaatagaggagaaataaaaaaatggattctctcaaaacactgccatttgaatagcgacagaagtgctcccccagcccccaactttggacagcaaagttgaggagaatgagcagacacagttgtttgcttgatctgaatctctctaaagtaaagtatttccaaactgtgtgacaagagcctacctaccactgtagcggtcaaagctgaagcttcttacagcagtgaaacggggcaccacctcccccacactcctcattccccgcttaaaacatggatactttcaaatttgactgtttcttaaactgccatcctaagatatggaaaatttttatagtaaagtgtctagttagcttatttccttttctaaaacaagtgttttcaagataactgtattttacctttatatgtactgaatagctgtttctttttgaattatttgccttttaaaatttgataatgtctctggatataacaggacaggagttcttaaaaaatatcttaagaaattcactttatgggtaaacccaaggtttttgccaacttgttgcctagaaaataagggctagtttcagtttatacaaatagaattattaaacattttacagtccttgattagaaaccagacccaatctccttataacaccacagcgtatcctgccattgacagtgtaatcacaattctccctttttcatttagctgcttttttattattactaaatgttttggattgagcatttttccctctgtaattttcttccttcacgtttattttaactcttgtagtattttattgttgttaatttacaagtttaaaaatattaggtactattaataatggttaaaaatagaaaaatgcatatttttgtatgataatcaaatgtaaaatacttttatttttgctggacagttgttatatcatgattattgtgctacagtttattgtgcataatatgaaaaacaactatgacagccttcagtcgggccagggtgaagctgcttataccacctctgccgtcagagggacatgtggtgacagcagtggtgtggctgcacagggcgcactagagagagctcagcacccctgctgcccgccagcagagcccgtgctgagggaatgccgcacagatgctgatgcactgggtgaaatttctagtattgaacgtaaaggtgtacagtgtcttgctgttattttatgatggaaactgattttgaaaccaaaaatagctaactaactttatttaaggaaaggatattaatttgtactaacagagggtgaaagctgttcacatttgtcaacaaaatctgcttgctgcagtagtaacctcaagtggttaaaacttgatttcccgagaaaactaaaacctttgtgcctaaaattgatgacttgagttcaagtgggatgagcaagaagatgtgttatcttgttgttcaacagtattgaatgtgaaggaaattttgatggcttaataaaattccacagcgactgtt

SEQ ID NO: 49 - DNA, 100388 bp, Homo sapiens
gccctggccaaggaggaggctgaaagagcctgagctgtgccctctccattccactgctgtggcaggtaagctcagatgcgggtaagcacaggtgaagggaggtcaggtgcaggtatcctcaggtgtgggtaaactcaagcgtggacaaactcaggtgcagataaccacagatgcagttaagctcaggtgttggtaacctcaggtgcaggtaggctcaggtgcaagtaagagcaggtgcaggcaagctcaggtgtgctttctggggcctgttactcatctcctcttgaggctggctggacaggaccctatggagcagctggtgaacctgtgttcagcctgggttccaagaggctgtctcagcagaagggacccaccaggttgattcacagaggggataagtactctgtcagctggtctcaaagaggctgaaaccctctgagcttccctcagggccagcttctaaatccaggtgccagggatctgctcaggagccccggctccaggcctcaacctcttgcctgtcattccttagcatcttactttgcttcagggaaaaggtgcaccttccttagaaccccagaaaatgctgaagttctaggagagacagggtttatacttgtaagcctttatcagctgatatttcacctgtgaaagccttggggaagagattggttacacggaacaggatcaggaggggagattactgctccctctcactgctgggagcagtgcaaactggtttctggaaggcagttcaacaacatgcagcaaagccctgcaagtccacacctaggaacccatcctgaggagcgaatcctgaagggatgccaacattgacacagctttgtgtgctaccgggaagcacagcaaacaacccaaacgcccagaagcagagggctggacacatcaatcatggtctgtccataggatgaaacatcacgcagtcacttttaaaatgacagagaaaaaggcataataaccgtacagaattattgtgtttttcattacacacacatgcacctgtctaatctattcacggaaaaagcctagaaatacaaggaaatatcagttgttttaggatggaggccttatgggtggtgtttatttattcttttgtacatttctacattttttgtcttctttaatcattttctatcacaaattaattttcctttttttcccagaaaatatatcttttgtactttttattagtacatcatagttgtgcatattgtgggggtacatgtgattttttggtgcatgtatacaatgtgtatgtttttttaaaccttagcaaaaattagcaaaagtagtgggggaggtagggaggaatgaaaatatttgcagggccaggcgcgatggctcatggctgtaatcccagcacttcgggaggctgaggcaggcagatcacgaggtcaagagatagagaccatcctagccaacatggtgaaaccctgtctctactaaaaatacaaaaattagctgggcatggtagtgcgcgcctgtagtcccagctactcgagaggctgaggcaggagaggttgaacccaggaggtggaggttgcagtgagccgagactgcgccactgcactccagcctgggcgacagagtgagactccatcaaaaaaaaaaaaagaaggaaagaaagaaagaagaaagaaacaaagaaagaatatttgcataaattgtgtttgcgttgacaagggataggaactgagaatggggaaggaagatgagacacattttctctgtctgaatcagatatttagggaggaattaagaacggagccctgcctctctatgagtgcacttgatgaatacgggactgattctgggaaagactgcctttggtcaggttctcaaaacaccattgttttgaactatccagcagcagttttaattcatggcatttgcaattatatttatagcataaattgtctattctctgcagtgtattttttagccctcctcccccagaaaatgtaattggaaatatcaactcatgttgaatgtgtttgctgtacctgtttatgttttattgattattttctgggagaagtttggagttgtgtttggtttggctctgtgcaacctcatttatttgctctgtaaagctgataagcacaagaagtgaaatgacactcaggcattttaagatgcgagtcatcttcattctgaactaagtgaaaacaaaacagattttctatcaacctaaaatcctcctactgggggcagtagatgtttttagaaaattggctttggctttgattgacaatgtttggaagatgtcctataatttgagagtgtatgtgtgtgtgtctgggtgtgtgtgtgtaaatgctggacctgggaagatggaagccctcagccaggagaataagaggacacaatacccccaagccttccatgacctagagattaaggggatttaacgtcttaaaacctccattaagtagacagtagcaagagacatgttgccctcagtgatatgcaaaggcatatctgatgggtcagtatctgccatcctcctcttttgcaagctctgaggttagactcagccatgggtgaaggaattacagcatccattgggagcaggcagagtccaggaaagagatttttctgttacctcagatgcccatcgcgccaggagcaattttcccagcctcttgtagaaagcacatattagtatctatctcactgcttttcagaaactgtatcttcaattgctaagtggggaaaaatgcatttacaatgctagagctgactttaagaaaacaagttaacatcaggccacagcactcccctcccccgctgctgagaccttgtcgctgtgcaccttgtcccctccctcacggcttctggctcccgctcccccaatccctggccccctgtctgcccctgccattaaagtggcaagcacaggtatcctcctccctcatcacaacttatccatcctgtgtctgctcccccagggtgggtaatgcctgaaatgccttaaggtaggggtaacgctcatggcaggtggccctggctctcctggagacagggcacaggaatgggcaaattcttcaggcttggtgaggtggaaagcttgctcctcgggaatcatggccacagtgcccttttttgtttgttaatcattaaaaagcatactacatgaatatataaagttggaaaaccccacagaagagccaagtgaagtcctgcttacacactcctcctgatccctactctcccgtgctgtggaccatgcttagtgtttgacgtgtattattattatttttgtgtgtgtgtgacagagtcttgctctgttgctcaggctggagtgcaatggcatgatctcggctcaccgcaacctccgcctcccagattcaagcgattctcctgccaactagctgggattacaggtgcccgccaccacgcccagctaattttgtatttttagtagagacaaggcttcaccatgttgatcaagctggtctcaaactcctgacctcaggtgatccgcccacctcagcctcccaaaatgctgggctgggattacaggcgtgagccaccacgcccggcctgatgtgtattattctagacctctgctgcctaatagaaatagcacacgcgccacagacataatttcaaactgtgtagtagccacttaaaaaggaaaagtaaaaacaaataagtgaaattaactttaattctataattcatttaacacaatatatctaaaatatgattgtttcaacatgtagtcaataccaaacacatactaatgaggtattttatgtctttctttattgttctaagtctttgaaatcctgccacacacctcgttttcagctctcatgtcacagtgaacattagcgtgccatctcacactcacagcatgtctccattcaccctggccacatctcaggtgcgcaacagccccaggtagccagggtctaccatgcgggacagctctgctcttgaatatcgggaagtttgttcctgtagagctggatcacatcggaaatattttactacgctttttttttcaattcataatggagacgtttacactttagagttctgtgttagtcttgttcatggttgcatagtccatgatttggtacgtcgttaattggtttaatcagtcccccaggtagactaacaaaaaagtggaggtttccaatttttcacttagcttaaaatacactgcaacaagcatccatacattgcctatttacatgcaaaagtatttccaggtgatcgatccatggaagtgaaagtgctgggtcaaagacaggcatgcaccctttgctctgagaggcaagccagtactcagccaagccggccaccaatttgccttggggtttggacgttgttcccttagaggtaaaagcaaagagttgggctggataccctccatagttcctaaatgctcagttccatggcccaaagggtggtgattcctgccaatgcctttggtggacgtagtcttgggtgggtgggtgggtgacagctacctgctcccactggagggcaggcctggattgggcagataagcaaatcaaccacacacaccttgtctagataagcagaaaacactcagaaaagaccccaattgttttatttgtaaaattgctctttggctaattttcatgaatgtggatcattcattaaacgttatcatagaaaaagagcagagcaacaaaggggcccggcagtctgattcccgtgctggcagcctccaccgtcacgctgagctgtggtgaatgcctagggtttcacccgcctacccctcactcctgctggcgtgcaccctttccccaccctggtggccccagcaaacatcacagtccctgagggccaggaggcttgggtccccagatgcccacacctgacaggcctagtgcctgagcactctggtgagggacttccctggaccatgggagcactgccagaggaggctcgagggcagggacctggatgggtagcaaaggacagagaacatcgggaaaggagagggtactacctgtgggaaccaggcaggcacaagaggctggccctgagcctctgcgcatctctcctgcagacactggctgcacctgcctagcctctgaaacccagaccaggcactcaggcaatgaggggagctccttaacacaacaccttcccaactgctgtgcttttcggagtgagctggccaggtgatgttggccaaagcaggaaggggagctgttgaggtgccccaagatccttgctggaatcctcaggttcccagacaatcagggtagacccggtgatgggagaaggagatggggacacacatggatccgaagctacaagattctgcttctctctcctgtttttgtttattcttttaagatgttttattgctaaataaagcattttaaaaagtgtataagatgtctgcacatagtttagagaatgataaagcagatccttgtgttttaccatggggccctttcccactgcactccttccctcccagaggcagcactgcctgacttctgcctggctcgttcctgcctttgctctttctttctctctttttccctcccttcctccctcccttccttccttcttcccttcccttcgtttcttctttttctttccttccttccttctttcttttcttttcttttcttttctatttttatttttatttttttgagacagagttttgctcttgtcacctaggctgaagtgcagtggtgctatctcggctcactgcaaccttcacctcccatgttcaagcgattctcctacctcagcctcccaaatagttgggattacaggcaactgccaccacgcctggctaatttttttgtatttttagtagcgatggggtttcaccacgttggccaggctggtctcgaactcctgacctccagagatccacccaccttggcctcccaaagtgctgggattacaggtgtgagccactgcgcctggcccctggcttttctttatgtttcatttagtttagttttgaggtttacatattttttatatttatttatttatttattttcaaatggagtctcactctgtcgcccaggctggagtgcagtggtgtgatctcagctcaccgcaacctctgcctcctgggttcaagctattctcctgcctcagcctcccgagtagctgggattacaggcgcctgtcaccatgcctggctaatttttgtatttttagtagagacgaggtttcaccatgttggccaggctggtctcgaactcctgacctcaggtgatccacccgcctcggcctcccaaagtgctgggattacagacatgagccaccatgcccagccatatttttaaataatttattgagatgaaatttgtatcacataaaatggaccattttcaagtgaccaattcagtggtatttagtacagtcatgaggtcatgcaactaccttgtctctctgtccttacttccaacactacaaagtaaaaccccctacccattaagcagttcctccccatttcctctccctgtggccttgcccctggaaaccactagtttgtgctttgtctgtatggatttatctattctggatgtttcatctaaatggaatcatacatatgtcaccttttatgcctggcttctatcagttagcatcacgtttccaaggttcacccatgtggcatgcttcagaacttcgttcatttatgtggctaaataatattcttttgtttgtataacatataccacaatttgtttatccatctatccactgatggacatgtgagctatggccaccatttggctgttatgaatagtgctgcaatgctacatgtttatttgagtctctgttttcatttctcttgggtatatacctagcagtaaaattgctgggtcatatggtaattctacatttaactgaggaactgccaaatcattttccaaagtgactgtaccattttacactttcaccagcaatgtctgaaggttccaattcctccacatccttgcaaacactggttactatttttttattttgggatgtttttaattataatcatcctagtaggaatgaagtggcacctcatcatggttttgatttgcttttccctaatgtctaaagatgttgggtatcttttcatgtgtttgttggccatttgtatatcttcattggagaattgtctattcaagtcctttgcccagtttttaatcgggttgtctttttgttgttgagttggaagagttcttttatatattctggatattagacccttgtcatattttgatttgcaaatatcgtattccattctataggttgtgggtttttttcctttcttaataatgtcctttgatgaatttgatgaacagtttttcattttaatgaagttcaacttacctgctttttcttttcttgttcatgcttatggtatcatatctataaatccatcgatcatgaagataatgaaaattcacacatatattttcttttaagagttttatggttttaggtcttacaatttagtctgatccattttgagttaatatttatagctagtgtgaagtaggggtccaaattcattcttttgcatgtggatatccaattttccaagcactattagttgacaagactgtcttttcccccattgaatggtcttagcacctttgctaaaaatcacttggacatagatatatggacttatttctgaaatctcaatcttactccactggcctgcatgtctgtccttatgctagtaccatacttctttgattactgacgctttgaaattctgaaatcagaaaatatgagtcctctaactttgttctttttttcaagattgctttgtcggccatgtgcggggatcatgtttgtaatcccagcactttgggaggctgaggcgggcagatcacttgaggtcaggagtcggaggccagcctggccaacatggtgaaaccctatctctactaaaaataaaaaaaattagccaggcatagtggcacatgtctgtagtcccagctactccagaggctgaggcacaagaatcacttgaacctgggaggcagaggctgcagtgagccgagatcatgccactgcactccagcctgggcaacagagcaagactccatctcaaaataaaaaaacaaaaaaaaaaaccagattgctctgtccatttagcccattgcaattcatgaatacaggatgtctttccatttatttatttatgccttctttaatttctttcagcgaggtcttgtcactttcagtgtacaaggccttcacctctttggttaaatttatttctagatactttctgatttttgatgttattataaattgaattgtttttgctgtacagaaatacatccaatttttgtatggtgatctttcaccctccacttctgctatattagtttattagctctagtagcttttttgtggattctttgggagcttttttaatcttttttttttttttttttttttttttgagacaaagtctcactctgtcgcccaggctggagtgcagtgtcataatctcagcttagtgcaacctctgcctcccaggttaaagcaattctcctgcctcagcctcctgagtagctgggactacaggtgtgtgtcaccacacccagctaatttttttatttttagtaaagacagggtttcaccatgttggccaggctggtctcgaactcctgacctcaggtgatccacccgcctcagcctcccaaagtgctgggattacaggcatgaaccactgtgcccggccccttattgttttattttgaacttcatctgtatttctaaataatgcattgttgagcttcacctgcttttgaactttatacaaatggaatcacactgtgtgtatctttgatgactcatttcttttcttctgtgctgtgtttggagagtcacccatatggtagctgcagtttgtctgttctcgctgctgtgtgatattcctgcgggactatacggcaatgtacttgtacatgctaccgcggctgggcatctagacggctctgtgttgagtgcttatgaacagtgcggtctcctggaagatacatacatgcacaagtatatttccagtaaacctcagtgtggaagtgctgggctgtggaggatatgcctgctccacttcctgagacaacgagaaatcgttttctgtcctcctgaaaggggaaggctcaaaagcaaatgcccattttggagaaaacattttgaatctgccaaaggagaccctgagtaatgagggacagggctgggggtccaggtccggctgcctggccgcgtggtcggcctgggctggtggctccactgtgaccctccatctcctcttttggtgccactcgcctcccagagcccctaccaaaaccctaactcatccacagccccagtttcttcgttcgtaaaaccaggagagctggtggtctctgcagacttacaacgcaccgacaccacacctttattctgtgggaccgtcacggtggtcaccacagttaagaaatgagaccctgcactctgccttgcccctgctgttcccactcccaagagcattttccccagagctcctgcctggaccaatcctctcatccttcagggctaagccagtgtcccaccccaccccaccccacccctcaagagcctcctcagtccagagagaaaaactttctccctcatcccggcccctcctagaccactttatgggggcttgggcccacctgggagctccgaagggctgagtccccttgacatatctggagccagcagagcccacctcgtaagagggctttgcaagctaacagttgagccacatgcatgctgggctttttgtgtgacattcaaagtggtccaggttacaaaggccccactgaacttttgaagaaggtgttttttgttttgttttgttttgttttcccataatcctcccaagttttacaagctgagttgtgagatgtgtgggaacgttcatctataaatatatgagcagcccagacactgaccatgagtcactggtcaccacagaccacactgggtcaggacagccccagaggaacacagcgcacatgtgaacctctttggggggttctcccgccctcaccaccaagtgccactccttattcttctctgtaggaccactcccacccggtcagcctcccaggaacaacccctgctgctcccaagcccagcccttcaggagtgcccctccgtgcccttccctgcccttcggatctgccccatcctgggtctccatccctcagagccgactgcagctaactggccaacctgctaaacaggtggtgctgagatctgagaggcgcttactgacttaacatgtgcacgctggtccccagcagccccagaagtccatttaacatggatagtgacatcgtccacaaagggcagagtgggcaaatacttgcaaaagccttggaaaaacacaaaccaagatttacgtccagcactgttagggctgtgagttctggagtgaagcatctctgtctcattgtgtccgatctccagcacagcaggcgaggcccgggtttcactctcagctctgccatcccactggcctgctgcttcctcggccatggatgagggaattgcagacaatgtcatcagtccacccaacctacccaacagatcccaggcattgaaacagaagcagaactattaccctcgttgcacttttttttatcagctaatgcttaagaaacttcaaaactgtttactgaatacaatcgctgctagacattgggcttgaagttttacacacttaatcacacttaatccttacagaaaccatgagaaatcagcctcattactccatgtcatagacaagctaatcaagactcaggaaagttaagtaagttggccaaggtcataaagataagaaatggtggatctgggagctgactcaggtacgtctaaagcccaagttctccttccaccacactgtttactgtattttttttaaaaaaagagccactttcaaagcttaaactcgaagaaatggccttaatagtaaagctttccagcaccattcagacttgttgggaagattttttccagggtgcagtttcttttttttttttcttttttgtttttgagatggagtctcactctgttgcccaggctagagtgcagtggcacaatctgaggtcaccgtaacctctgcctcccaggttcaggtgattctcctgcctcagcctcccgagtagctgggattacaggtgcccaccaccacacctggctaatttttgtatttttagtaaagatggcatttcaccatgttggccaggctggtcttgaatccctgacctcgtgaccggcctgcctcggcttcccaaagtgctaggagtacaggcatgagccaccacgcccagccccaggatgcagtttcatatggaaaataccacatggaatcatttctagaaagcaagaatcccggggacagccacaccggagaacaccatgcagctggttgaagggtgaggaagctgtctgtgtaatggctcaaaaagactcccataaatgttgctaaagtttccttttaaaaagtcctttacgagagcatgtgtgctgagaaccaggaagaaatagctgaagggaacgcaccagtgttcatgggggttactgctaggggctagggttgcagaggaaaaaaagataatcacttttttgtttcaatatttccgtatacttttaatttgttccattgagcacatactagtttagggttttttcatttgttttaaattttaagcaaagaaaaaccaaacacacacacaccgtagtcacttcccacccccacacggtgctcccggccaacccaggatcctctgccccaggtgacatcagttccctgtgcgccacatggcacagttatccccttactcacaagggcaggcagaagtgccttccgcggtgttctggggcccaaaagcttatgcactttggggacaccatgttgaggaaaatgatactaacctattacaagtctaaagcaagctccaggccttggagaggtcatccaagtgtcggccctggagctgacgcttcctcaatcatagggtgaaccgtcccagggtagctgggcctggacccgtctcatcaattacaaactctcccgagccagtgaccctgggcctcctcgagttacagagcaaacggtgccgctcaggcctgtctcggccccccatccaccgctgcccgggaatgtgctattgcacacaggcctccccagtgttctccagcagtgttgtgggccagcactaaggtcagcaggccatggtcaccaatgacctgtcataggcatcaagccaaatcctactggactctgtagggaagaaacaacgtatacttcatagatacttaccaagatagcctcccggattttgaaccaagtgggaaaagttaacaaccaaaaaaacataactatatataaaccctcccgggcaatgttggcccaccattgccaaccctcagaaacccacccagtgggggacacgctggccacatggtcagagaattacgaactacctagaaatgaccactcctgttgcacaataatgcaacaccagaaggcaaacagcagcagcctgtcttcagtttccacactgtattcatcacgaattttctgtattgatttttgttttttaaaaatatggcattaaatgttacttatcctaattactggatttctgatacccccatttgagtgcctcacttgcctcaccctaaatctagaactgcccatcagccaagaaagtgctgggagccccactgcctcacagaggcgccagcagcttccacgcaattctgccaccagacttctggtaggcaaacactgatctcccgctcgggggggccaaatgtcaatacccgcagcagggcttatcgcatcgccccggtacaaaggcctcctctgacgcatccccccagcagaaagaacgttcaggtgtttgataccatggttgggaacgttcccacaggtagcaggaagacgaataccgccgcttcagtcaatctcatacgacggcccccaaatcccaaaaaggcttagtatgaaatgcccatcctagtccgtgagtgtggcatgtccgcagtttgttccttcagatgtttcctacgtttcttccttccggtgggttcttggccttgctcacttcagcagtgaagccgcagacttttgcagcaagtgttacagctcttaaaggtggcgcatccagagttgctcgtctttccaggtgtgttcgtgggcttgctgacttcaggagtgaagccacataccgtacagtcagtgttacagctcttaaaggtggtgccaacccagacactttctgcttgcagcaataacatttattgccaagggagaaagaacaaaaagaagaaagcttccacaaccaataaggagacccgagcggattgccagggctggcgctggtgaccagcttttattcccttatttggccccacccacatcctgctgattggtccattttacagagagcagattagtccattttaaagagtgctgattggtccgtttttacagcgtgctgattggtgcgttacaaacctttagctagacacagagtgctgattggtgcatttacaatcctttagctagacagaaaagttccccaagtccccacccgacccagaagcccagtcggctgcacctctcacaaggactagagtgaagcgcagatagctgcatttcttaaaaagttgttttaattgtggtaaaatacacataacataaaatttaccatcttaccagtttttaaatgtacagattgtgttaagtacattcacattgttgtgcgaccaatccccagaactcttttcatcttagaaaatggaaaaactacccattcctccctcccaccagctcctggcggccaccattccatttcctgtctctatcagtttgactgctcttggtaccgcacatcacacagcaattgtccttttgtgactgacttatttcacttatcgccatgtcctcaaagtccatccctgttgtggtatgttctgaatgcccttcctgctgaatcatatttcattgtgtggatagatcacattttgtttatccactcatctgtcgatgaaaacctggcttactcctacctcttggctattgtgaataatgctgctatgaacacaagtgtaaaagtccctattgaggccgggcatggtggctcactcctgcaatcccagcactttgggaggctgaggcaggcagatcatgaggtcaggagattgagaccatcctggctaacatggtgaaaccccgtctctactaaaaatacacaaaaaaattagcggggcgtggtgatgggggcctgtagtcctagctacaggactacatggaggctgaggcaggagaatggcgtgaacccgggaggcggagcttgctgtgagccaagattgcaccactgcactccagcctggggcacagagcaagactccgtctcaaaaaaaaaaaaaaaaaaaaaaaaaaaaaaatccctattgagacctgcttaactgctggatcataggataatcctgtgtttcattttcgaggaactgccatactggtttccacagtggctgtactcttttacattcctgccagcaatgaacaagttttccgatttctccacatcctcaccagcacttgttatttcctgttttttcagagtatccatcctaatgggcatgagatagtatctcattgtggttttaatttttagttccctagttaagatgagtgatgttgagtatcttttcatgtttgttggccattcatacatcttccttggagaaatgtgtaaagtccttttttaaatcagtttgttcatttgtttgctgttattgggttgtaaggtattgtaaatattaatatattttaaatattaattgcttatcagatatatgatttgcaaatatttctccacattgcataggttgtcagatatatacacttttaacaacctcccttagaccaggggagaaatgctttgaagaacctggcacaggatctgtgggcccctttctagaagcaagtttctgggccaggttccacctaggagcagggcccaaggggaggagacagggaggagtgctggctccactcagaccctggagcccctgctgggagaggtggggatgctgacctaggcacccacaggcacccagaagccagggcctcccccatttacagggcacatcatgtccctggtcaccacccctcgaaagagcatgatgccaaaaagcccgggctgtgcctgggtcccctctgcgatggggcagggggctgcacacatctgcaaggcgcagcttgtgttagaagcacctgcctggcttatctccatgtgactctgtaaatggggagcagtggagtctgataccagcaggtgctccaggcatccagtctgatgcctcgcaggagctccctgctctgctagctccacctgaggggctagaggccaaccttgccgctccccctctcctcccgtcccttcctcccagcctggtctgatgccccatggttctccccacagcccccaggtgttccccagtggtcccacccttttcttcaggtccagcagatgccttagctggagttatctgcttatgacagcccttgtttatgaccactgtgaaggtagttctctgaagggtgagagaattagataatccaacacccagcccagttttcctttgcttttctcctcggaacggtcagagatcagtgatcgtacaagttagtcccacaggtcttccttccaggacatcctacacccatcagtctgggcctggggtctttctctaagcgtgaggcctgtggctgcgggtccagggtatcttttctgccagtggtaaaaaatgagaagcaaatatcaaaagattcaaaagcctgaccctggctgctgtctgtgtccagccaggataattcggggtctgcattgcagctcttctgtttttgtttggttttgttctcctaattgactatttgcactaaccaggtcagggctaactagtaacaccctacattctgcacaaaaaatcagcaaccccatgacctgtgatgagggtggcctggcaggaggcaaaagcgacaagcgttcctggtatctgaccagcaccaccttgaattaggacatcaacacatgcgattggactataaatcatgtaatgacaactgcaatgacaactctaaaaacaattgggcgtgtgctcacattttcacagtaaagccccgacaatgttgacaaaatccactgtttgaattctgatacgactttcttccattttgtgatctttttattgctcttaattacaacggttagcattagagacataccctatgattccattatttgcaattgcagcttaaatatgcatatgtcctaaatgatggaatgataaccagcagtgccattggaaaatgaaaatattagtgatgctgcagaaatgccaaggatgtaaccatgaggctggactcttggaactggccatagctggggagaccttggactgaggcaccctggtattggctgggtgaccctgggcacattctcctttttctcttttttaaaataagctatgttggtctttagaaaattaaaaacacaacacggacaatgaagaaattaaagaaaaagtctgtatcccctcccacaaacacaaaatgaacaagttaatgaatttgcttccttttttcctagccatattttgtattcactttaaaaagaaaaaatgttggctgggcacggcagctcatacctgtaatcccagcactttgggaggctgaggcaggtggatcacctgaggtcaggagttcgagaccagcctggtcaacatggtgaaacacccatctctactaaaaaataccaaaaaaaaaaaaaaaaaattagccaggcgtggtggcgggcgcctgtagttccagctatgcaggaggctgaggcggggaatcacttgaacccaggaggtggagtttgcagtgagccaagatcgcgccactgcactccagcctaggcgacagagtgagactctgtctcaaaaaaaaaaaaaaagaaaagaaaaaagaaagaaagagagaaaaaatgtcttactgatagcactattcacaatagccaaaagtggaaacaacccaaattcatcaactgatgaattcatgtaatggaatattacagaggcatagaaaagagtaaagtcctgatctgcgctacctggatgacccttgaaaacatgacgccgagcaaaaggagccagacacaaaaggccacacgttgaatgattccattcatatagagtgcccagaataggcaaatccatagagacagaaagtggatttgtggttgccaggagctgggcagggtcagggaggaatgaggagtgactgctaatgggtaccggctttttttaggagtgatcaaagtgctctggaattaggtagtggtgatggtttcacagtcttggaactatatgtaaaacactgaactgcagactttaataggtgaattttagggtatgtggattatatctcgatttttaaaaaagaaagtacaaagaaaaatatcactgtctttaaagatccagctctgtttcctggactctagtctagaggaggatctctcagtgtccccagaggagagcccctgggagagaagaaggctagaaacccggaggaaagggaaccctggcccaggagaggggtcggctgtgacgacctccagcatttcctgcaagccagccctgtcaccttcctgcggatagtgatgatgaagcagaggacaataggtttcaaaggtcttccaagcatggtgtcactaggctctcacaccagcctgtggggcagatgtgaggggtatcattgtcctcattttgcaggtgacgttccacaagatgggactgaggtgaccctcagctgggccctcctacctgtgctctctgcagctaggggcaggaggctgcatctgacctgagagtatccctgagaagccagagcaggactctcagctgaaccacccagaaatggccagttggacccaggccaggacctccagtggcagtggagcgagggggtgggagggtggagcaggaaggagtggttgtggcttttaatcctttctgcatataaggctgggcggcttgtgctttggctggcaggcttgtttgattctcctgcatggagagtttcaggcatgcaggtgccaccccaggtggggcccacaggtgcccctaggagccgggcaaaggcaggtcccagggagctgtcagggcacatgtgggaacccgccgccacctgcagctgtgccaggacaccagccagcgttcccacatcctgagggctttcaagagaagccataagtataatctccctcttggttaataatggcagctaaatgtagttttcacaaaaggttccaaccaagcccatatgtgggccacatgtagctgtgggaatgagagtttgagtcgtctgctctaaatatatacacaaaacaagcagtttcttctggataaactggtccacacatcattcatttcattgcggggtttgcttgttaattttggcccaagacatagggctttgagtaaacagagcctcgcccggcagtacaccagctcttacattcagaagccacttccccgagccatgtcctcccagaccaaagtcacactgtgtctttgcagccttcctccttgtctccgtccagccttctcaaggtatccccctgcaccttcctgtacccctccttgtgggtcgcccccacctgtgtgtgtaaacaccttctagaaggtcacattgttaaagccccccatgacccttcattccactccagctcccaccatttctgggctccccttcaggggaagacttctcctcggggttgacacttgctgtctacacttcctcggccccctcactctaaaactacgtaaatgcccagagaataacatgacaacgtgcacctgagcaacccccacccagatggtacaaaggtttccttggccatgtttgtagcagatatttctttctttaaaaaataaataagtacagagctggcagaacatttcccattgcccttcagcccactcctcttggactttcttcccgcagcctccccgtggcccttcatggacacatggtcctggctacagatgaaaaatcgctgggtcctcagcagggcagtcatatttgataatgaccaggattgcatttaaatctagtacctcccagatactgtacagataagatcccagctaaggctcaaaaccactcaaagccatttccatttcagagatgagaaaatcacagctcagaggggttgggggcgtggtggcagtgccagcagtccgcctccagtatgacctccactgtcccttcactcagccggggtagacagacttcccagctgggacaagcactcttaaaatctcagtgggatttccatctccagtgccagtgctcctatcatccggcacagaggcattcaaaataaccatttctgatggactggaatattttgcacaagtgggcagtatctcacctaatgggggtggggaggttatgaagggtttgtgaacaaaccacaggaagccctgctttctcctttcacaaggacaggtggcacctgcagggtctcccctgcagtggcgttatcgttgcactgaaacttgcatgaccaatctgtaaggagtcagggtgggttcagccatttgttatgaccttggcattgttcagccccagagcctggcaggaggggaaggaggaaagtttgactgaggggcctccacccattgcctttcacctgcacactgcctctgagcagattcaggagaccaagctcctccccaggtgagccatgcctctcctggggtgacctggcttacttcatgtgtgccctgctggcaaatgctctgctgctgtaggtggcattagcaagggctgagcaggtggcactgctccaccgggaggttgagtaaatcactgagtcattaggagatgttgagctctcgccaggccctcctggaggcacaggggatacagcagagaactgaagggggctgctgcctctgtggctttggtgcgaggttggggaggaggggacaggcaggaggtgggggagaaggtttatggagaacagagcgcaggggttggggtagatggggagtcagggagccctggtgaagaggccacattagagcagagactggaacaaagggagggcaggatttgttcatcttgcttcccaagaaagaggctgcaggcaaagtgactcttactcctcttgtttatcctcgtaggttctagaagatttctgaggactcagcagtaacttgcagtgctggactgaggctatttccttatatcaactttttgaaaactcatggttaatacctaagtaaagcacttccaccttccccccctccccccctgagaaagtacgttagtcacatgctagcgtttttattaggaaaagacggatttccagtgaagcagagggaagtggattgagcctggctcgggccatggcgccagttgcacttgccctggtgccgagccacagcaagggctggcactcggcaccatgaaaagccctccttttcggaatctgggggacaaaatgcaagaccgatgccccagagtcatcacagatgaccttcattggcacgataaggggggggacagggggccctgccttgaaggaggcatctaaacaccccttgtgatggaacagacttagccacaaaagccagcgaggggcacgttgttgctccctcatccgccggtggcattaagtcctgtagggcaggctgcgtttccccctttcacgatgaggggcctgagcctaagcgctcggagcctgggctttagtttctgattccccacgctgtgctggcacaggtttcctggacagcgccccagcgcgggtttcttatcctagggcggtgagaggggctgccagggaaagtgtgggaaaggacgaggggcgggactatgagagggagcggggctgggggcggggcctggaggaccgggctgagagggcgggaccgtgagaggtaacagggggcggggtgagggggcggggtcgaggacgatgggggcggacttgggggcggggcctgggggctagggaaggacagtgccagatcttgtgtccagcctctggaatcttccctcagttcttccttgtcttttcgtggccttgacgtttttgaggaacgcaggtgggttatttcgtaggatggccctcagttcgggctgtctgatgatccttcctccagatcaggttcagatgatgtactttgggcacttttgttcctcttggtgcgttttatccagagcctcataataaatatttgttccatgacaggcgatgtgcactttgttttaggtggttctccccagaattctccactgtcaagttactaatttctcctttgtaattaataagtatccatgggaaatactttgagattatgtaaatacgttgttactcttcagacttttacccactacttttagcattcatcagagattcttgatggttgccaaatggtgattgtcggattccatcattccttccacatttaatagggactttccactggaagaaagagctttctccctcccctgtgcgtttatttacatatgtatttatatcagtgtggacccatgggtctttatttaagtctaaaggttataattcttcattgtagtcatttattttcatgctgaagggaccccagagaaagccactgggagccccttcaagcagccactgtgttcttttggcatgttcccatgtcaaaagtaaagtttctcacttgctggtacagtaaggtgttccaggctcttcttatacttccccgccccagccctggattccttttagtggagaatggtatttggaaaccagtattggagcatgagtatgctcattgctattgaagtgttattgtgaagcccattaagggagccagggaatgtatgagtgtgtaagcatacaggcatgcatgcatatgtgcatatgtatgtaggcatatggccccaaggtccctgcctgctgatatgcatgctttgtgtaaccccctcccttgagtgtgggatggactgagtgactcaatgctaatgaatgggctacggcaaaagccatgggctgtcactttggacaccaggttataaagagacctggcttctgttttgcatgcactcttttgcttgcgcactcagagggtggtcagctgccccttcgtgagctgccctggagagcggtttccctggcaaggagttaagggaggcctgggccaacaaccacatgagtgagcctggaaacggatccttccaggtttccttccttcccttaagaccacagcccccacccatagctcagtcaaatccttgtgagaaaccagagtcagaagcacccagctaagccacattcaactcctggtccatagaaactgggagataataattgtttgttattctaagccactaagttttggggcaatttgttttgttactccatagttaattaatgcaatatgttatatctctatatatgtgtatatgtatagacagggaccacacatacatttatatctgtttttatacctgtctctatatattacaaaccatgagttcacactgataactttaattttagctcagtgctacaaggttcattgtgaccttccccactttccatatttgtaactcctttctccagcagtgagaaacccagctccaatcatctgcaatgtattaatttatttgttcagtcctagaggacacaaaaacagcttcagaattgctatcctatgttccagaaaaagtaacctactcatgggagttcaatctttgtttagagttcttgtctttagttgtcatatagtccaaatactgcaacccctatgttataaaaaacaagggcttcccagcttctctgggaagtaaggcatgagatgcaaaggggaaaagcacagtttctttccaggcagcaggtgctgggcttcgctgtcttgcgctggagaagtgcgaaacagacgggaaaagtgcaaaacagaagggcagggcggggcttcagaggctcccgctccatgctttctttctcccctgagcccacactgcctgcctcccttgcattagcacaaaagcaccaacctctgaggccagcgatgttgtttttaaacagtcattaaattatttacagagaaaagtgtacggtgttgctttttgaaggctactgaggaaggtttgaattttcatcatttctattattcaaaaagccaagtaacaagccgacttggatcttcccagaaaggctgagtttggggggtacttgcacgccctagtccgcacagctgggactagggctggggctctcctagagtaacaaatggggcatcggcatgacctctctgcggagggcctctctgacatgcagttgtcactgcagacctctgcagaggtgacctccccagagacaagggacctcccagagcagcactgctgcttaggtaaatggggacagccaggaggccagctccaagcctcaccccgcagatacctcagtcccatcctggtcacaggcacatggggcactcctcatggcagttgtgggaaagtggccaaggacacaaggctcccgccggccatggtttctctaagatctgactcaggattgtcacatgctaagcgttctacttccccatgcctgcaagcaccccacaagctccccacagacatacacactacacaggtcatagtcatgcacacgccacactacacaggtcatagtcatgcacacaacacactacactgcacacataccacacacataacaccacacacacatcacaaacacacaccacacatgcgtgcgcacacacccactcacatacagactcatcacacacacacacatgcatcacgacacactctgcactcgtacaacacacatccatcagacacatacacaaacatagcacacacacacacacatcatacatccacaaatagcacaaatacgcactgagccaggcctcatggagatccagcgaagggtgctggctctctccctgcctcccacgagcccttccagggatccccgaggcccctgccccacagcctgcctgcacctccctcccacctgcaggaagggctctccccagctctctctgccaactgactccacaaaccctgggaagcagacccaatggggcccttcagatgcaggccggttcacttcccagtgcccagcctctgtgtgagatgtccctggtgacagaacaagaggccatgtgggataaagccagcagaaatcgctgagcatccagcaccagcagggcctccacaggggatttccctcccacctccttctgctccaggtggcctccctgagccacacccctaacgtgccatttccagatggtaaacaacacttgcactgcagtttatctccttggaaatccccacagctcccaccccagaaccgtgcacaaaaaatatcttcaacaggtggatatggatgaattaaggtgcaaaatgagaaccattaaatacatacttgcaagccatttctcttaaaaggtactagagctaagatccttaaagacttgcatccaccattattgcagatgactattcagatgttgtgggcagacatattgttttataaaggtataagaatggactctgatgatggcttgggaatgtattggtccaatatccacttctctctctcttccagggtcagaaatcttggatagagaaaaccttttgcaaacgggaatgtatctttgtaattcctagcatgaaagactctaacaggtaaattgaaatccacgattaagacattatccaaaccagtgcttgtctgccactattctcatgtttgtaagaggcagaaagaggagtccagaagggtggccagaatccattccccatgggagtcactaacaagggagtcactggggctccttgttactccattaacatgcaaatggcttcagaaaagagtttgtgtccaccacccaccctaatgcgaactctcatagccaactgggcccacatcattcctcttagtctcagcaagatcaaggagttgagggctttcaacaggtttccaggatattttccaggcctcttcaatagagtttcataatgtatttagatgaaaaggaatttccatcacaggaaagatctgagcggttgaatgaactagctataactttattaaaggatttggcttgtacacaaaacatccaacaattttattcacctacattaaaatgcatctgttataagctgaacagaggccttgtaaagtcatgtaagtagagattaatttaactaaaatgtctcatctctaagggcaaaagctatgaggctgagtctgggggaaggggaacaatttatccatacattcgtccaatatgaaattcatgcaggtagaataatgacacagaagtacacactcttcaagatcacctgcttcaaatttgtttcacacatgcaatcacagtccctccacatccccaagctgccccttgccccacaccaccctgcagattctcctccctgcttaaaccccagtgattgccccccgaggtaagaaatgccattatgaaacaatgccaacggtcacaaaagtctcccctttgttgcatctacatgtcccttcttatttcaatggcacataggccatcctgggaactctctgtgccagcactgcagtcctccatgaagccagatgcccaggcaatagagggcaaaaagtgcttctgggctcacatacaagcctccttgatgcactccatgcagtccccagcatggattaaaaaaaaaaaaaaactagaatgaaaaaaccaaccgtttaaacccttggaaatgatcccaaagacaaacagcaagtaaaggaatatctttagagaaagccagcaaaaattcagtaagaaaggctagagtctgtgggatttgaaccaagagtttcctccctccctctgcccagctcagcaagatagagactctactccagagtgctgcagccaagaacacagagctccctctccaccagctcccagtcagggggctttcttcctgggaggagcaggatttcagcatttctcatcctgtcccttaccacctgttgctgaggctaagtcctgaatgaatgcagttgagagatagaggctcccttcttccacccgtgccccactcatgtaagcagcaaccacagaaagtgagagtggttataatggattcagacaaaacatactttaaagcaagaaaatgtaactagagatattaagaacattttataatgataaatgggacaatcgatcaggaagttacaacaaatataaacatatatgtacctaaaacagcaccaaaatgcatgaagcaaaactgacataaacaaagggagaagtagacaattcaacatgacagttggagacttcaataccccactttcaataatgcatagatcacctaaacagaagaccaacaagggaatagaaagcttgaacaacatcataaaccaattaggcttaacagataactatagagcacaccacccagtaacaatagaaaacacattcttctcaagtgcatatggaacattctccagcatagaccatgtgttagtccattaaaaagcctcaaaatatctaaaaggatagaaataatacaaactgtcctccaaccacaatgtaataaaattagaaataagaaaccaataggaggaaaaaaattggaaactcataaatatgtgaaaattaatacactaccagataaccactaggttaaagaaaatgtcagaaggttaattagaaaatacttttaggtaaatggaaatgaagacataacaaaccaaaacttaggggatgcaggtaaagtagtacggacagggaaatttatacctgtaaatacctatattaagaaagatatttaataagtaacataactttctaccttaagacactggaaaaagaagagtaaactaaacctaaagcaagtagagggaaggagataatgattaaagtggaattaatggaaaagagaatagaaaagtagagaaattcaatgaaattaaaagctcttctttaaaaacctcaacaaaattcacatatctttagctagagtcataaaagaagagaaagataagactcaaatgactagactcagaaatgaaagaggggacattactaccaaccttatagaaatgagtatgaaagaatactatgacttatatgcaaacaaattagataacttagatgaaatgggaaaattctgagaaatatacaatctgccaaaactgactcaagaaaaaatgtacaatctgaacagatctataaggagtaaagagataggattagtaataaaaaaactgtccaaagaaaagcccaggcccacatggctttttcgatgaattctaaaaaacatttaaggaagagttaataccaattcttcacaaactcttcaagaaaatagcagagaagggaacatttcccaactcatttaatgaggccagtactacccagataccaaactagacaaagatatcacaagatagaaaactatagatcaatatctattatgaacatgggtgcagaaattctgaacaaaatactatcaaaccaaatccagcaacatataaaaataatgatacaccatgaccaagcagggtttatcccaggaatgtaaagttggtttacattagaaaaataaataatgtaatatagcatatcaatatagtagaaacaaaaatcacatgatcttttcaataggcacagcaaaagacttggataaaactcaacactctttataaaaaatcactcggaaaaccaggaatagaagggaacttcctcaacccgataaagaacagctataaagaatccacagttaacatcagacttaatggtgaaagattgctttcctcctaagattaggaacaagataaggatgtcctctctcgctacttctattcaacattttaatggaagtacaggccaaagcaattaggtaagagaaataaagaaagaaaaaatattgagattggaaagagagaagtaaaactctctatttgcagatgacataatcttatacatagaaaaatcctaaggaatccaccaaaaaatattagaactaataaatgagttcagcaagattgtggcatataagatcaatacacaaaaatcaaatgtatttctatacacttgcaatgaactatatggaaatgaaactggcaacataatttatctataattgcatcaaaaagaataataggaggactcacattttctgatttcaaaacttaatacaaagctacagtaataaaaggacaacgatactggcataggatagacatatagacaaatggaacagaattgacagtccagaaataaacccatacacctatggcaaattgatttttggcaagggtgaaaagtactttcaatggcgaaatagtagtcgtctcttcagcaaatggtactggaataactggatagccacatgcaaaagaatagtcttggacccttacctcatgctatctataaaagttaaaatggaccaaacacctaaatgtcaaagctaaaactataaaactcttagaagaaaatgtaagggtaaatcatgacctgggatttggcaaatgattctgagatattacaccaaaaacatggacaacaaaaacaacaaaaaaattgtctttaccaaaattaaacactgtgcttcaagggacgctatcaagaaagtggaaagacaacccacagaatgggagaaaatatttgtgaattatgtctctgataagggacttgtatccagaatacggaaagagatccaataattaaaaaaaaataaataacccaagttttttaaatgggcaaaggaaatgaatagacatctttccaaagaagatacacaaatagtcaataagcacatgaaaaatgctcaatgtccttattcttcagggaaatgcaaatcaaaaccatgatgataaactgcttcacactcagaaggaagactagaatgaaaatgtaagatagtgtgtgggagaggatatggagaaatcagaaccctcagacactgctggtggaaatgtaccatgatacagccaccttggagaacagtttggtggttcttcagaagattaaacatagagtaaccgtatgacccagcaatcccatgcctagtgtatacccaagaaaaatgaaaacattcatccactcaaaaacttgttacataaatattcatagcagcattattcataacagctgaagagtgcgaatagcccaaatgtccattaaatgataaatagataaacaaaatgttcatccattcatacgagaatattattaagccataaaagggagtgaagtaccaacacatgctacaatatggatgaaccttgaaaacatgctaagaagctgatctccaaagaccagatattacaggactgcattcatatgaagtgtctagaacatggaaatccacagagataaaaagtagacttgaggttgcttatggcttggggagtggtgcacaggtagatagatggtggtgagaaggaagataacttaaaatatgccatgccaagtttctttttgaggtgatgaaaatgttcgaaaattaactgtgatgatggttgcacatatctgtcaatactaaaaaccatttaatctctctctctctctctctctctctctctctctatatatatatatatatatatatatatatatatatatatgttttttttttttttttgagacggagtctcactctgtcaaccacgctggagtgcagtgccacgatcccggctcattgcaacctctgcctccggggttcaaacgattctcctgcctcagcctcccaagtagctggaattacagacgtgtgccaccacactcagctaatttttgtgtttatggtggagacggggtttcacaatattgaccaggctggtctcggactcctgacctcaagtgatccacatgccacggcctctcaaagtgttgggattacaggcgtgagccactgctcctggcctgaatcacatacttgaaatgggttgattatgtattacatgaattatatctcaataaaaggaaaaaagagagagagaaagagggagggagtgagggagggaagatggaaggccatcagaaggagggtgggagggagagaatggggaagcgaggagggaaaagaaaaaggaaaacaaaaggaaagacaaggcagggaggaagccccaaggctggccccatgggagcacagaaagccttctggcaagggccctgcacatgtgcattacacacgtgcacgcattcgcacatctagcccagtaaagacatcctctctagtcctcaagccaactccatccccagctctcccaccccatttgctagggtgcacggctgcccacacaggctcctgctgggtccaggaacagacctccctccatgccttccctggattccatctccaccaaggcatcactccaggctactgcagttcttcctaacaaacttttcaagtttttggtgggtccagtccactcaaaacagtggcagccaaaaatgatggagtaacagatgaaatcctaggcacactaggaaaagaagctggcacaaagccagggaacatgttcagagaagactagaaagccagagttcagggagggcgtgagaggttggctgggttttgggagagatgctgtagagctagaagatccctgatgctggggcgggttatggcccaatgggccatctgtccaaggcagaaaaagacatattggtcacttttgaaatagccttttagcattacttgagtggagaaatgttttactaaggaacagaacaattcaacaatatggaaaaatttggctgacacctaagtaagtaattttagaactttgggaggccaaggcaggcggattgcttgagcccaggagttcgagaccagcctgggtaacatggcaaaatgctgtctctactaaaaatataaaaactagctgagcatggtagtgtgtgcctgtggtcccagttactagggaggctgaggtgagaggatcacctgagcttgggggaggtctgggctgcagtgagctatgatagcgccactacactccaacctgaatgacaagagaaagaaaaatctggaaggtcaactctatgttcggagggcatgtctatactttgtcacagaatgtttagtacttgatgtttatactgatgttatcaagacatcaaaaagttgaaatattttccgaaagagcaaccatccaatgtgtctaaaatcgactggcatataaagagatgtgcactgattatctggaaaaggccatcagatggggcatttctgtccctaataacgctggcttactgaagtgttagtaggctcctgtttgggcccaactcacctgttgaggttaattcatttttgctaatgaaggggaaagggggagattgttgtagaaagaccctgctttgcctttgttttcaggtgttgctgtggccagttcaccaaccagcatatcccccctctgccaagtgcaacacccagcaaaaatgaagaggaaagcaaacaggtggagactcagcctgagaaatggtctgttgccaagcacacccagagctacccaacagattcctatggagttcttgaattccagggtggcggatattccaataaagccatggtgagaaaggcattcagacatggtgccactaggatcacagctttcattggcggccagtctcccagccccaaactgcagatacctggtcttcttcatggctgtggctcaatcttcctagatatttcattgaaaaaccaagagatatatctgtgcacatggcttttagccatgaggcttggaaactggacaccactgtaaagaacatctagtgtcccgtaaatccataccaaagctctgaatccacaaaccaggctctggcccaaccctgcaaacacactccattgctccatcttcagtaaaggaagacaaattcatttttctaataactgtggacctgcagcccccttagatgtgttgagagtctttggaaatattttcctctgaggtctgtccacagcttccctgggcctgcgctcagctggcccgagaaggaccaaggtccctcacatttgcatgtaaacagggagtgccctctgcccttccagtgagccctgccagcgtgggggaggcttcagctctgtgatccgttccagctcactctgaattacactcctacatgcccagtcacagactttttgcaatttcattttatttcactggcccaacatcattgttaaaataaaatttagctgtgttccaaatgctgcaatatacagtcttctgaaatggcaccctacatattagcccagacacaaagaagcagtttataggagacaaggcatctgagcattattagcctcctcctcactttgaagaggtcaagttcatgggtgggcccatgatcgcctgacccatttactcaacaacatcctcatccaacttcttgggccactgttctagctaagccagctttggaacctattcctccaacattaggattgccagataaaatacaggacacccagttatatttgaacttcagacatacattggataaattttcagtacaagtatgtcccaaatattgcatgatttattgcatttaataaaaatgttgtactgaaacatttttcattgttcctctaaaattcaaatttaactgggtgtcttggtctgtttggctgctataacaaattgccttaggctggggaatttataaacaacagaaatttattgctcacatttctagagtctgggaggcccaagatcaaggtgccagcagatttggtgcctggcgagggcccatcctctgcttcatagatagcaccttcttgctgtgtcctcacatggcagaagcagagaacaagctctctgagtcctctttttttttttttttttttttttttgagttggagtttcgatcttgttgcccaggctggaatgcaatggctcaatcttggctcactgcaacctccgcctcccaggttcaagtgatcctcctgcctcagcttctgaagtagctgagattacaggtatgcgctaccacacctggctaattttgtattttttttagtagagacggggtttcaacatgttggtcaggctggtctcgaactcctgacctcaagtgatccacctgcctcggcttcccaaagtgctgggattacaggcatgagccaccacgcccagccctgagtcctcttttataaggacactagtcccactcacgagggatccatgctcatgacgtaatcaccttctaacatcccacctcttaacactattgcattgggaatcaggtttccacgtgaattttaggggaatacaaacattcagaccatggtaccaggcatcttttatttgtatttgctaaacctgacaatcctctccaaagttcccttcagtcacttggccacagactcacacagagggctccagggccctgaggaagagacaagccaggcagttcttgcttggacatgagcaatagcctcactcccctttgacacgagaagcaaaaccaagaacagaggctgagtgccacacactctttcacagtatatccgtgtatcctatgacaccaagccagactcactgctccatctcatggtgaaagattggcagctggaactccccaagctcttaatatctgtgcatggaggcctccagaactttgagatgcagcccaagctgaaacaagtctttgggaaaggcctgatcaaggctgctatgaccaccggggcctggatcttcaccgggggtgtcagcacaggtaagagcaggccctttccctcccgataatcaatgtaccacccagaactcactgtggtccccaaagagcttcctaataactaaggacaacaaaacatattgcatcctgatcctatttatgactaaagtgaagtctttattccctagcttgtgttttttactttgatatgactcttaaaaaaaaacagcaaatatagtaatgattgtcataatggtcaacatctctgggtcacccatgacatgcaatattccttgaactgagccctgtacaagcatcatcttcattagacctctcgacaatccttttcctgttataggacaggaaactgaggcacaaagacattaaggaacataccaggcagtatggctctcaattttcactgaaggcagccaaggaatgccaaaaagactccagttatttccagctttaggccttagacatctgtaaaggaaatccctacacagttgctttggtttctgtttttgttttcccgtttctagagttaatgcaagattgctcgttatcatgagctcagactttcagtgtactttgttttaatgataaagatgagtgtgtctcacccctgatctgtagggaatgtagggactcagggcaagtgtccctaaatttcatgaatgatggtgtgctgggaagtaaaagagcctaaaatatgaccaatggctgctcacaggtgttatcagccacgtaggggatgccttgaaagaccactcctccaagtccagaggccgggtttgtgctataggaattgctccatggggcatcgtggagaataaggaagacctggttggaaaggatgtaagtgttttctctgcaaatgttggcagttttttaaaattaatgattgattttgaggtaaccgttgattcagatgcagttgtaagaataataagagagctcccttgcagcctttcccattcctccaatggtaacatcttgcaaaaccataatgcaagatcacaacccggatactgtcattgataaggtcaaggtgcagaatgtttccatcaacacgaggatccctcctgttgccctttcatatacatatacctcactccttcctacccccacctcttccttaacccctggaaacaactaatctgcaccaccccgcatttcaagaaggttctgtaaatggaatcatacagtaatgtaacctttggggattggcttttttttcactccacatagttctctgaacacgcgtccaggttgccatatgtattggtcttcattcctttttactgctggctgacatcccatgatatggaggcaccagtttctttaaccatttgtctgttgaggaacagtttggctgttacaagtaaagtagccataaacattccagtgcaggatttgaggttaacataggttttcatttctctgtgataaatgccaggggtgcaattgctaggttgtcattatctaaaacaattaactttctttctattttaatgtaacaattggcaaaaataaaaccttcaaaaggcagggtagagatgtgagaataagttttagtgcagtcactccacacatatgtattgtgcttgcttcccttgttggtcttaacatccaagtcctgcaggtctgatttgcgctgtgcactttgtcaggtaacaagagtgtaccagaccatgtccaaccctctaagtaagctctctgtgctcaacaactcccacacccacttcatcctggctgacaatggcaccctgggcaagtatggcgccgaggtgaagctgcgaaggctgctggaaaagcacatctccctgcagaagatcaacacaagtaagtgctggcaaaggcacgcagtcctcctgggctgatgccatcacagtggaaacaaggctgagaaggagattgattgcccaaggggattagaagattaaccttgcttcttgttaggtcaacagaaaatgactcacctagatgtcttaccttagccacctaccaaatcacattcactgggctacatggggatgctttgccccaggttcacaagttagcacgaaataaccctcagtgctcgccatggtgatggccttgcccaccctgttgcccagtggttcttgttccctgtaattagttgttattttttaagtgttttaacaggaaaacaatttctcaaagatttagtaggattctttctatttgctgataagtattatgtgattattaaatatctctgtaatgctgggcctttcatgtagactaagatggccaggtggggacatatctggagagggctgcaggagccatctgctcctgaaggggcatcatccttgctggtcctgagggggagctgtcactgtcagacgaaagctgaggtcgaactagagagaaagacgcaaacctcaaccagaagaaacaatgataacaactggttagaattacaataactggtataatctcttggagcatgtttatactccagtaattcttaacgtcaaacaattgttaaatgatctgaaagagcagtttgtttttcccattactggcaagatttttgtgggagaccatctagtcctggcgaatggtcattgggaatcatcatgtatgggactgtgatgctgcagagtgggtagaatggggatggcctactaggaaaagttgtagatttccgagaatcagatctcgaagaatacattggtcgatgactgaatgttttttgttctcacatctctaatttttctggacttgtaagtttttacaacaccccatttcacctggccatgtgacttgtgggcttccctttgtcatccttcgcctagggctctgagcagggcagggacagcaaaggggtgctcagttgtcacttcccacagcacggagcttcgaggactccagcctaagccaagaagaacctgttctactctgttgctcgaaaagaaggtgatttggccaccatattcctaaagattgaaaatatcaatccttgcttgggttggaaatctcaaaggcggagtccaggatatcttagttcatttttccaatatctcctggtcagggctttgcacaaagcagaccctcaatgcatgtctgctgaaatgaacttagctgtaattactctggtggacacagcagagttattcaacatatgtaagagtccctgactgtagaaacacctcatggaagcaaattagaaactctgaaatggctcatttgaaattctccaatcttctcttaaccaatgctggcagatttttatctgaagcccttcagagctgagaccaacgatacttccacttgcctttagttaatatcgatcaactaattcccatcacaactaatggacagctggtgaaataggctcagagtgtgatctgtcatggccagtgtggcataaaattaggaagtaggcaaatgtgcctccactcccatttccttcccattccagaatcccaacttcctggaatcttcctgccacctcttgcttcccagagccatgcctgcaggttctgccaccaaaagttagttggtacccactgtgttcttgaagagtcctattaactgatagagacagagggaggactctgggaacaggtcattaactgatgggccactagtggtccaagtggctgcgtccaagatctgcactttattccagccactgaagacagaaacgtcaacaagaacagtgtacctcatttgtatgctacttaacgtttacaaaattatttgctagccaaacacatattctgatatttttacaactgcaggagttaaaggaagcactgtgattgttcaccttttacaaatggctgtctaaggctcttggtgatttggtgattggcccagtgtcataagggagaagccaggaattgaactgcaatttccctggctggtccagatcccctttcatcatcttattcttcagggacagccatcagggtgggaatttcagaccataggctaggacagccagggggatatttttccagccaggaataccttccaatatttctcagtggtcaccttgaagtagccccaacatcaggtgggtgggttattcaggagtttaaccatatgtgagtcagaaagtttcagactttgaggtcctggttttcccaatgaggccataatatgtgacagaatgcaagaatgataactgggctgggcacagtggcttacacctgtaatcctagcactttgggaggccaaggcaggtggatcacttgagcccaggtgtttgagaccagcctgggcaacatggcaagacttcatctctaccaaaaattagccaggtgtggtggcatgtgcccatagtcccagctactcaggaggctgaggtgggaggattgcctgagctgagagggaggttgaggctgcagtgagccatgatcatgccactgcactccagcttgggggacagagtgtgattctgtctcaaaaaagaaaaaagaaaagaaaagaaaaagaaaattgttatcacatgcctgaattccttccagccagatagaacatcccccaagtcgtaatgtttttactcttccccatacttcaggagttaaaacgactgggtggacagtgcagggcacaggtggtatgggcgaatgtggtttgtgttgcaggactggggcagggcgtgcccctcgtgggtctcgtggtggaggggggccctaacgtggtgtccatcgtcttggaatacctgcaagaagagcctcccatccctgtggtgatttgtgatggcagcggacgtgcctcggacatcctgtcctttgcgcacaagtactgtgaagaaggcgggtaggatttctgacgcgcgaggaagggcgggttcgtaactccctctttgtcgggccaaggagaaaatctaaagtggtctgcttagacattccaaacgtgtttaaatcaggaagatttgctagatctcctctcccatttcctcaggtcagcatccaggggaaccatcagaggcagggtgttcctgatggaattctctctccctcatttccaacttcatttgcccttagaaagtttgcaacaaagctggaatttaggacaagtgagaatacgatgtttgactatggttactttttgtctcctgtgtcaggatatcctcccacagcaaagtctcaaatcaaagacagagatatgtctgactcattcatatatagatttaacttgccttgttttgttctcttgcattttctttgaacagaataataaatgagtccctcagggagcagcttctagttaccattcagaaaacatttaattataataaggcacaatcacatcagctgtttgcaattataatggagtgcatgaagaagaaagaactcgtaagtgtcttgaatttatttccaaacaagctctgtggagagaattatgtttccttttctaattccgcccatgtgtgcatgacagggttattcatattttagtccggccttttctgagagacagtacaaatgcataccaaattggtggctgtgtccacatgacagaagctgaacgagcccacacaggggagggcccctggtgctttcaaactttagcaagtggggcatgacaccacacaacaccctctgaggctcataatattactcagattgatagtcttggggaaaagggccacataccaccctgtcaggcatgtttacaaagttctgttattttatttcccactccttccctcttccgttccatttacaaggaataggtactcttgtcgtgcacataagatggcctcttcaaaattctaattcctacaaatatctcctgtctgattagatacgactttgcatctccgatggcgactgagatttcggagtgtagctccctcctctcgagggtgccagaagggatggggaaaataataaagtcagtatgcaggcaggcaccccacggcaatgccataacttctggaaatcagccgggcacagtggctcacacctgtaatcccagcactttggggggctgagacaggcagatcacctgaggtcaggagtttgagaccggcctggccaacatggtgaaaccccatctctactaaaaataccaaaacaattagccaggcatggtggcgtgcacctgtaatcccagccacttgggaggctgagataggagaatcgcttgaacctgggaggtggagtttgcagtgacccaagatagcgccattgcactccagcctgggcgacaagagcgaaactccatctcaaaaaaaaaacaaaaagaaaaaagaaaaagaaaagaaaaaaaagaaatcaacagcacttgctttgaaactgtttagtgctcaggatcattttattacgtgtcagtctctgtggtcattttgtaacaacaccccatatctccttcttgttttcaacttggctttaattcagtcttttcacattttcaggtcactgtgttcagaatgggttctgagggccagcaggacatcgagatggcaattttaactgccctgctgaaaggtgagctctcaggaaatggtgactcctgtccctctgatgttggcctagccggcaatccttccctcccggcctcccatggactatgtctgctggtgctagaccctgagccagccaggccacttgagcagtctcagcatgaagccacggcagaatgacaaggctcgctgtttctgtggggcagaggtctgtgggtgctcctggaccatcatgggctgaggtcagaaccgtttctatttgtaactggttcattgagggcttcagctcctagagtgtaaacatcagatgggttcctttgcaatcactgcattccgcagtgttctgtccaatttccccgtcttggttctaatgacaggcttcaggccagcgttcatggccgggcggggagggtctgctctgggatgcacacttcctccctgcctctcagttagcctggtgccatgagggggcagggaggacagagagaggggaagggtcactgtcaggctggctgcctggcagtcccagggttccagccttcctggagatcatctccagggtccctgagtcactgggttcctgttctgtccctcccaaggagaccatgcacagctggcatgggaagaggctgcctccaccttcctccagggaagctctttcagctcggagcctttgtggtcattcagggcaagagcaaagccagcaatgcttagttctaggccagcagcccaagggaagcctgtgctcaccacccagcacctgccaaaccctggcggtccaggcgtggagtgaaaaatcattccggtttcttgcctttccaggaacaaacgtatctgctccagatcagctgagcttggcactggcttggaaccgcgtggacatagcacgaagccagatctttgtctttgggccccactggccggtgaaactgttttttttcgattcatatcattgatcttgactttgtacaagtgacctattagtatgttctcccttgtgacatggaattcaggaaattatgtggggtttctgatgatatgatatgtaatctattaggctcattagaagatgtcactgtttaacttcaaagaaccaacaagaagtaattccacattcaaaccagtactcctgaagaaattaatcaccaaatattttatcgttgctgatgaaagtgggtttttacctttttaaagaaaaagaagaagaaataaaatagcttattaaaatttaatgcaatgcttccatccagggcaatgatttttcaaactatgttccatgaaaccctggaggcctagagaactctgtgtgtgtgtgtgtttatgtgtgtgtgtctatgtgtgtgtctgtatgtgtgtatagggtgtctgtgtgcatgtgatatgtggtgtgcctgtatgtggtatgattttgtgtaggtgagtaatgtgtgtggccatgggtggtatagtgtgtatgtgggtgtcattgggagggtattgtgtgtgtgtgatatgggatgagcagtgtgtgtggagtgttgaggagtactaatgtgtgtgtgtgacatggggatgagcgtgtgtgtgtgtgaacacacataagtctgcatgataaaggactccaagcctcctacttcttcttcagtcaaagcagcttctttgatccattttatagattaggagtcaggataaatttgtgtttgcaaaaagggctctgctgcttatgaaaggtagtaggaatatctagagagtttatgttggttttaaaaaccacatttcttggccagatgtggtggctcacacctgtaattccagcactttgggaggccgatttgggaggattgcttgaggccaggagttcaagaccaacctggtcaacatagtgagacaccatctctacaaaaaataaaaaaaattagccaggcatgggagtgcatgcctatagtcccagctactttggaggctgaggcaggaggattgcttgagcctaggaatctgaggttacagttagctgtgactgcaccactacactacagcctgggtgagagaatgagatcccatctctaaaacataaaacaaaaaacaatgcaaaaccatttctcaaaacatccctggcatattgctgcacaaatgcattttacttaactgcctctgtgtttaggtctcccaaagcatttaattgcctcccaaagcatttaactgcctctgtgtttaggtctcctggaagttgcttccacacattgccataacacgttttatcactctttattgattgatcatgtgtagacggatccatcaattctccacttggtaatagaaggaggtggattgctcactctgcttccactgcccctgttcctcctggatttgatagttgcctgtttaattctattttttctttttttgaaatggagtctcactctgttgcccaggctagagtgcagtggtgttatctcagctcactacagcctctgcatcccggattcaagcgattctcctgcctcagcctcccaagtagctgggactacaggcacccaccacacccagctaaattttttttgcatttttagtggacacagggtttcaccatgtcggccaggctggtctcaaactcctgacctcaagtgacccacccgccttggcctcccaaagtgctgggattacaggcatgagtcactgcacccagccctgcttaattcttatattggtcacctttatgacggtaaagagtacgtggaaccacctacttgttctgtccgcttcagactcccattttgttaaatgaggaaattcactccatactcctccttcctctcctgacaagtttcatcttcctaattcaatcagccccacttttacaaggtgcttgacatgatgaacatgtacatatccttctttaatcattgaggtcctgcttacatcttactctttaatcatcattcagtttttgtacttagtctctatgttgattctaaaaaaatggagaaaccagcagctttgacattgttgtgattacatggagattgttcactgctgaaccgcaaagtaggattgaagtcaaggagaagggaaggtagtcctgggtcatttatctggctcacacaaaggaaaatatgacaggcatcaaggtttccatcattcaccaactatttaaaattaggtgacactttaatttccttcatatttggaccatgacttatttgaatagatatttgcttttctccacatttctaattgattctctttttttcttccaaacatttgccttgatgtcattgctgtatctattcttttttttttttaagtatttttattgtatctttagtttggttccaaacaaatagatgtaaagtttggtacctgcctatgtacacttgccactgctaatgttgaggcttatactagtccgttttcacactgctataaagaatagcagtcttctgagactgtgtaatttgtaaaggaggtttaattgactcacatctccaaatggctggggagaccccaggacacttacaatcatggcggaggacaaaggagaagcaaaggcacatcttacacggcagcccatgagagagagaaaagagcacaaggggctgccaaacatttttaaaaccatcaattctcataagaactctttcactatcatgagaacagcgtgggggaaactgccctcatgatccaatcacttcacatcaggccccactcttgacacctggggattacaactggagatgagatttgggtgggacacagagccaaaccatatcaaggctcttgtcagcaacgtggatatatcaagcatggctgcagcaaaggctaccctgtggggagctagggcaaaattattgcactctttccaagatgaagccatacagatattaccttaaaaatgccattttgtacttttatttgcatatacatagtttatatttaatatatactttgtactttaagttcaggggtacaagtgcaggtttgttatgtaggtaaacttgtgtcatgggggtttgttgtacagattatttcaccacccagttattaagcctagtacctgctagttgtttttcctgaccctctccctcctcccactctcctccctccaaaaggccccagtgtctgttattcccctctatgtgtccatgtgttctcatcatttagctcccacttatgagaatatgcagcatttggttttctgtttctgccttagtttgctaaggataatggcctccatctccatccatgtccctgcgaaggacataatcttgttcttttttatggctgcagccatatctattctcttaattgttactgtcccatttcttcttgaagaatctttcaaagccccatgagttcctacccccatcttccctggatgctctcaatgcctactgtacagttgtctacatcagacatcccttcgttgcactctgagactggccattgcctcctagaccccatgtcttcctccctttcagattcctttttcattttgctggagtacatcttcaagtaacttttacataaaagcatgtgggagaattactgtctgagtctgtgttgtgtttctgtaacagaataccacagatggggtaactgataaagaaaggagatttatttcttacagttctagaaactggaaagtccaagatcaaggggctggtatcttgtcagggccttcttgctacatcatcccatggtgggaggtgaaagggtaagagagcgagagacagcgagagagggctgaactcttaaaacaaatctctcaagatcatgaaccctctccctctataaaagcattaatccattcatgagagcagaatttcataacctaaacaattttaaaggtcccatctctcagcactgttgcactggggattcagtttccaacacaagaactttgggggacactttcaaaccacagcaattatcattctgtgtctttacatgtctgaaaaaagtctgcctcacatgaggctcaagattgtcctatgattttcattcaattatagatgaaccattgttttctctctgctctttgctttttcagtgcttgaaaatttcacaaggatgtatcttctatttcaagcaaatgaaaatagaagtgtatagagaatacaaactcaagcagccatatcttcacacatgtagacatttaattcttctggctttcaaaggtccctttatgctgaagacctgaatcagctctgtgaaattttcttctatctcttctttgagtatttctttctttattatctctttcccttcatctggattttctattagtcaagcaactgctggtccccttctcccagactgaccgtccattttcggttttttatttctctatcattttgctgtatgtttttggaaatctcaactttttctttagcttttatacaatttttaaaggtttaggcactcatgctttttatatttaagaaagtgtttttgttccttaacaattttattttcttattagcctattttcatctcacagatgcaatatctaaggatatgaattagattttttgaagttatcttctgttccctagattatctctattttctccctggtcagctgttctttttgttcattttgggtttttctgttatgctgttgattttctcaaatgctctagatccttggctgtccatcacactacagaatgagggatagaactgcttaattggtatggaaacccattttgccaacaggtttttctcctccctgggaggactgcccaggaattccctgcttaggaaggagagtatcgcctgaacctcctgctttgctgagtgccgactggagagggctgatgggctctgggcctccctattctttagcagacatcctcccagtttttactgggagtgaagcccaggaatgcagttgcttgctctgcacccaccacagtggcagcctggagaccgggaggggatgtgtggcctcctgctctgtagaccatcttccggtcaccatgccttctgcccaccacatgccctcttctttgtatcttggaaaatctggtctcacctcaagagcaacctccacattacacattttgggctttggcttcctctccatagttttaactggtccttcaatgcttccagaaatttgttaaaaactctctggcccgcctcttctccctgaaatagatttttctttttcatactcctctgctgtcatttaaatagtatctggggagggagggaagacaggaaacacatgctcaggctgtaacctggagccaaaagtccttctctgtctccctacagtgggatataaggtctccaaaatcttcttttaatagttgaagcactcaagaaaggatgtgcctgtgaatctatagtctatctagaattcttcatatagtagaaaacttgtggtagggaggacataagaattccaacacagtaaatcaatcttaggtctgatttgctatatattactagacaaaattcttctatctatattttctgttattgaatgcaaaaaataaaagctgcatgagagtatgatgtggttatcagaagctaggatgtgagggattgggagattttggtttaaaagtacaaagtctcagttaagaagaataaattctggagacctattgtacaacatagtgactataattaataataatgtatagtgcacttgaaaattgctaaaagagtagattttaaatgttctcatcacaaaaatgataagtatgtgaggtgatggatatgttaattagcttcatcgttccacaatgtatacatatatttaagcatcatgtataccataaatatatacaatttgtcatttgctaattaaaataattaattaaagtaaaagctttgcaaaaaaaattcttcttaaaacatgcttttaaacataacgaagaggccaggcacagtggctcactcctgtaattccagcactttggaaggctgaggcgggtggatcacctgaggtcaggagtttgagacaagcctggccaacatggtgaaaccccgtctctactaaaaatacaaaaattacccgggtgtgatgttgcatgcctgtaatcccagctacttaggaggctgaggcaggagaattgcttgaacctgggagccggaggttgcagtgagctgagatcatgccactgcactccagcctgggtgacagaacaaaactccgtctcaaaaaacaaacaaataaacaaacaaacaaaaaacataatgaagagagagaaaaagagagacgtttgatatatacaggtaacaaaaggcaatttatttatttatattgaatcataaaaactttggactaacaatttttgaaggaaaatcatcaccaacattcatctcaagagcttttttatcttgcaaaatggacactctatgcccatcaaacaataattccccatcctgccctctcctgtgactggcaaccaccattctactttctgttgccatgaatatgactactgttagtacctcctataagtggagtcatgtaatatttgtccttttgtgactggcttatttcactcagaacaatgtctcaaggttcatccgtgttgtagcatttgtcagaatttccttccttttaaggctgaataatattccattatatggatagaccacattttgcttatccaagcatccatcagtggacacttgggttgctcccatgttttagaataatgctgctatgaatgtaggtgtacaaatacttctttgagacttgctttcagttcttttgggtatgccaagaagtgaaaccattgatcacacggtaatcctatttttaattttttgaagaatcaccaaactcctcccacagcagttgcaccattttacatttccacccacagtgcacagggttccagtttgtcctcattttcacaaacatttgtcattttctgttgtttagataatagccatcttggctgggcacagtggcttacatgcctgtaatcccagcactttgggaggccaaggcaggtggatcacctgaggtcaggaattggagaccagcctggccaacatggcgaaaccccgtctctactaaaaatacagaaaaaaaaaaaaaaatgagccgggagtggtggcacacatctgtagtcccagctactgaggaggctgaggtaggagaatcacttgaacctgggaggcggaggttgcagtgagccaacatcgtgccactgcactccagcctgggcaacaagagcaaaactccatctcaaataaaaggaaaaaaaaagataatagccatcttaatgggtgtgagataatatctcagatggttttgatttgtatttccctaatgattagtgatattgagcgtttttgtgtgtgtttattggccatttgtgtatctgctttgtagaaatgtctattcaagtctcttgcctatttttgaatcaggttgggttttcttgttgttgaattttaggagttctctatatattctggctatgaaccccttatcatatacatgatgtacaaatatattctcctattctgtggctacctttactctgttaatggtattttttgctgcacaaaacttttaaattttcataaagtccatcggatttgttattaataatttttccgtttgtgcctgtgcctttggtgtcatattcaagaattgaattcccaaatccaatatagtgatatttttgccctatgttttcttctaagcattttagtttaattaattaattagtttttgagattgagtttcactcttgtcacccaggctggagtgcaacggcacgatctcagctcactgcaacctcttcctcctgggttcaaggaattctcctgcctcagcctcctaagtagctgggattacaggcacccaccaccatgtccagctaattattgtatttttagtagagatgggattttaccatgttggccaggctggtctcaaattcctggcctcaggtgatccatctgcctcggcctcccaacgtgctgggattacagacgtgaactaccgtgcccagcagcattttatattagtagttttcgattttatgttcaggtatttgattcattttgagttaatatttgtatatggtgtaaggtaagggtccaactccagtcttttgcatgtggatatccagttttcccagcaccatttgttggatgcggtgtcactctgtcactcaggaccataacggttttatctgcatgaggagtcagccaagacactttttcatccatatttgtatgttgaccaggaactatataaatgcacacctcccctgacataagctctgcctcagccctacttaagggttttaagcaggagagttacttgcttccatttttatatttaaaggtcactctggagttactgtggaaaatgcactgggtgggtgccatggcaggtgtgcagagtcctattaataggcctttgaaataattcaggccttggactagagcagaggcaaagaagaaggcaagaatcagaattaagcaaaatttagcattaaacatggctgcacataggggtagatgaatcattgagggcactggagggactgagatgtcacaatgctccccagttctctggtttgcacaacttgcaagctgtggtaacatttccctgagataagggaccctggaagaggactgggtcggagggtaggtcctgagagtggtttgggacataaggagctgcatgtctttgagacatgcaagcaggatgctgagcaggcaacaggagctctggggagagaggtgggccgcagccagaaaggagaagttgtatgccaatcagtggtgactggtggtgtgggggtcaatgaggtcgtcaaggaagagagtagagtggaaaggtagaaggctgaggacagagcccagaggaaccttgacatttaaagctgcactgagaagtagtggccagacagggaagaggaaagctgggagcttgtgatgcccaagaagccaagggaagagactctaggaggaagcaggcagtggagtcagatgtgctgagaacccagcatgaaatgcccatgaggcaggcaccagcacagttctcagcaactaaacccacagcccaggacagatggaagaagcagcagggtgcgtgcaggagagataggaagagaggaaatggaggctcctcaggtaggcaatccaccaggagcgtttggtaagaggagcgggtgggtctggcaagagaggacgccagctggagggtccggttgtttaggtgctggctctgtgtctgcaccaggacacactcccacattctccaccagaccaggagacaaggccacggggccaggcctacttctgctgtccctcctgttctctggagtagagcacacactccccttgatgaatgagtctgtcaccgcattgcatgcatttcagtgacatgcggagagcttctttacccgccgataagctccagtttacgtttacatccaggcaggcatcctcagttctatccattgtcttgtacccccttcacaatcactttttcccatcattaaacaactatggacacatgtctttggtgcctttgaactctcctttcagcatcctttcctccatgcaaaagcacacatggatcaaaatgtcagccactttaagtatgcaaagtcgctgcatcaagtcaagtgtgtgtttgtgcacacgagtaacagtggttcccagtatcagagccttcttcagacagccaggcctgcgacgactgagtatgtaggtgtatgggatggagtccgtgtgcacctgtacatatgtgtgggcatatgtgtgcactgtgtgggtgtgcacatgtacattgtgtgcatgtgtggtgtgcatgtgtgcacatacagaggtgggagggtcaatgagctggtctggggacaagaaagagccttagtaccatttcccaactctgattgctgtggactgcagcccctgggaagcctggcacccccgacggacagcaaagccacggagaaggagaagaagccacccatggccaccaccaagggaggaagaggaaaagggaaaggcaagaagaaagggaaagtgaaagaggaagtggaggaagaaactgacccccggaagatagagctgctgaactgggtatgtggaaggtcacagagatcacgagcttggcatcacccttccccaggggaagggatggttcttgtccttgcttcagtcccacccagggccctgatcccaggagggacgggtaaaggcttgactgggtagtgtcagcatttcaaactacaacagcacattcgctgcaatgagcctgtcggttgtccaaaacaccaaacgttcctgctttggggggaatgatgccacccacagaggggccctgagtcatcctgttcagcaatggttctgtacctggcagacatgccaatgcttgatgcatgaatatacagcagacaaatcagttgtcaccaaataaatgcaattcatgaaaaagcccttttttgacagacagagcccatgattgggtgtgtggggtaacagcagtttaggtggggaggctggagccacacatcgcatggcagttcttggtcttgctgccaccaggacacaggcaagacaggggaccaggcctctgtggtgacgtgtgcctgcccttatcacagtcactcacccacacggcaccctggtcatgctgcctgcccatgcagctcctcctggcacaacttctcagtcaaggaaacaaatggtggagactgggcaggccaatgccaggagggctgagattttgaatcctcttcaatctatttttaaaaggaaacaataatttacagacatggatggaacatgtagaggccaaactgagaagaaaggagaggggagatggggagtgtttacccaagataaagagcaaagagtaccatgctggagtgctctggaatctggcgttcggaataccctttcctctgtgtttccagtcgcccccctcccctgtgtctctgagaggccactcacaggctcccggcccttggtccctgcaggtgaatgctttggagcaagcgatgctagatgctttagtcttagatcgtgtcgactttgtgaagctcctgattgaaaacggagtgaacatgcaacactttctgaccattccgaggctggaggagctttataacacagtgagtgctctagaaaaagggaaggaagcgggaggcagccacctaaatgtgtttgtcactggtgcatattgtgcataaatgtgctcatctgacctccttcagctgggaggtccgtacttaatggcaggcggctacttctcacctgctgctggccacagcctgtgttcatattctcaccacctcctgccatgcctcgccagtcactcctttctcaggcagtattaactcttgtcccgcatttaagggtggtgtgtgagtacttgttgctacaaagagggaatctagctccccaagccattagcagagtgaaatgtcaccaagggtgagaagtcaattgttccttgggaccctcacatttgatgaggctttggggtaaaacatagagctaagtttcacacccaggagctctgctggaagggtttgaatgaaattcccttggcttatattattacaatataagttttgagaatttacatttccttccctattgtaagattttaagtagcagaaatgatcctcagcagctgcttgctaaaacttggtgaatttttttttgtttgttctgagacagagtctctcttgttgcccaggctggggtgcagtgacatgatctcagctcactgcagcctcaacctcctaggctcaagccatcctccgatcccagcctcctgagtatctgggactacaggtgcacaccaccacacccagctaatttttaaaaattttgtagagacagggtttcgacatgttgcccaggttggtctcaaactcctagcctcaagtgatccacctcccttggcctcccaaagtgctgggataataggctcaaatatactaatttgagccactgattctggccaacttgatgaattattaacactatattgtgcaccttaagatactcttttaaaaaaatgcaacagaaagtatttcacaacttttgaaatgtgttggatactttctaaccatgaccagctctgttttgtaaaagaaaaaggctggtgtgggttacactccagctctcacaattcattaattatatagagtagggcaggattttgctcgaagagttcaagaaaaaaacttatttatttatttatttatttattcattcttagacgaggtctcactttatcacctaggctggagtatagtggtgcaatcttagctcactgcagctgcctccccggttcaagtgatcctccaacctcagcctccctagtagctaggattacaggtgcccaccaccacgcccagctaatttttgtatttttagtagagatggggtttcaccatgttggccaggctggcctcaaactactgacctcaagtgatctgcctgccttggcctcccaaagtgctgggactacaggcgtgagccaccgcgcctggccaagaaaaacatatttaacacacatgaatgcttctctttcagagactgggtccaccaaacacacttcatctgctggtgagggatgtgaaaaaggtcagtctactgttttacaattcttacctgttggcatctttcacaaaatcatttcttaagagcaagttttaaattttcaaaatgtattattattccaggcacaggagataatgaattccttctttcgtaaagagtctatttaaaactaagaaagcaaaggataatcttttttaagttgcatgttcatccaaatccatgatagggacactgtcagtgacagccggattataggttgacgccagcgccaggccagggcggccactgggtggggttggggaagggggtggcctggctgctgacctgagccccgctgtctgtccatgcagcctctcgttctgtccctcctttgagatctctcacccactgcctgtggctctttccagaagcaccggcaggaggttcctcaagtcattctgtgtcctgttgattgcagctgctgttcttggccctttctgccaccttgttatcaagggatagatgctttccccagcctgaatattgtttaatcccccacccacccacctgttacatgaactcccaagtgggggccaggacagccacttaccccctagacgtgtgatgaagtccacactgcgaacgcattctcacagggcctgagaccagacttcttttacagagcaaccttccgcctgattaccacatcagcctcatagacatcgggctcgtgctggagtacctcatgggaggagcctaccgctgcaactacactcggaaaaactttcggaccctttacaacaacttgtttggaccaaagagggtagaactcagtgcctgtgtagtgttctgtggttcgcgagtaccatgtggttcctcgcttgcttttcaacaacttggccggttcagagccaagcccttcgccctgtccccagcacagctgtcctgcctcctacagtgctctcaggccagagccacggcattctccagctcccctgagcacgggccgccccgcccatccattgcatttgccctccttttctatccacagcagacttcctcctgggctccggggctactgtctgcctgctccagcctattctactatcccaccactgtacctgccataatcttccaaagcaagggacatgcctgcattccctgcttcaagcctcccagagctcctcactgcctggagaatcgtatccaaactcattatcacagcagccaaggccctccaccagctggccctcacccacatgggagaccacatacctgcaccaaaatcaaatcctgtgatcaaatcaaagacgtgtacctgccacgtctttccccactatcagtgcctttcccacccttatcaaaagtccaactcaaatgtctgatctttcatgatgccctcctctcacacccaccttacagccccacagctctctacatgtctattagggaacttctcggtttctacctggaataagggccacgcgtctgctgagctttcttctcaattaacttctgctgacagaagaagagtttctatattaaagcacttcttttccttggatattatcattaattgttaatgatacaaagtgctttttaatccattcgtatgtccactatcaacaatactgctaatgtactactaacattagttatctaagtaaattgattttttttcttcctctttcaccatgcagcctaaagctcttaaacttctgggaatggaagtaagtagaacttgttttcaacagttttataatatcctggtcaaatatacatagcccttttaagttctgtatttgcgaatatacgatactactcaccaaaatttacctagatgtcttagtcaaattatataaaaggaccatatatacattttctttaatggggataaaagctgcacaatccatttctagaactaacaaaaccacagtttcaaaagcaaagattaagcaaacaaaaaaactagagaggaacaccacttacgtatgcaaaaaccataagtaaaaaaccaaaaataacaccaaaaagaattcaatagactattttcatagtcctaaatcaaagtagagtcctccaagaatgcaaatacaatgcagtgttagtctttaatatattgcatcatatctatgaccatctctcagcaggtgctaatgaagaatttgaaacacatgtaaaacatatgccttactttgttaaaaaatatatagttttctcaaaatagaatgataaaatactttcttggaatgattaaaatacacgtatatcttagagcaagggaaacgtatgatgagcagtgcatccctgaagtcatgtccatgagaatcaagaacaagacaagcatgcccaatatcattggcgtcatctactgttttataattcttacctattggcatctttcactagtccccaaaagtgttctggaaattgaaccacaaggaaaaataaatgctaaaaaaagaatacccaagaaagggagaaattattatcagcaaaaaaatttggggggagttagaaaatccaggaaaatcaactaaagttccctcacaataggacaaaagtaccagaaattacctttactagcaaccgtaagaacaatgtcccagacctaaaaatatttaaatgaatggaagaaatgccatattgtggaatattaggattgactcttggaaacattctttttaaataaatttatgagctaaacagcatcccgattcttcatggattcagtgtagacggctttcattctgtgttgacaattaagactgtcctttaacacggtgctcctggaagggttatgagctttctgtgatctcctgttctctcaaactctccaggtcagggtttatttattccatgaaggtttggtggactcacctgtaaaatttccgggtccagtcctatttcttagaagtgtgcatttcataatactacttcataatagccattataaatataagtacatttcaggctttttattttctagagtcaactttggtcatttatagtttcctaaaatgacttatttcatctagactttcaagttccctggaataaacttttacatagtattctagtttttttcagtctcctcagtatcttcagttgtgtctcatttcttgtgccaattttttttttttttttttttttgagtaggagtctcactctgtcacccaggctggagtgcaatggtgcaatctcggctcactgcaaccttagcctcccaggttcaagcaattctcctgtctcagcctcccaagtagctgggactgcaggtgcatgccaccataccaggctaatttttgcatttttagtagagatggggcttcaccatattggtcaggctggtctcaaacttctgatctcagattctcaggtgatccacccatcttggcctcccaaagtgctggaattacaggcacgagccaccacgcccagcctcttgtgccatttttaaacaaaatttatatctcctattttcttaaactttctttcctacatattttactggtatttttgctttatcaagcaacttcctttttctgtttctattttattaatgtctgcttttatttgtatttgtttcttccatatactttccctactgttattgcattgttcgtgctaactcagtttgaaaggaaaattcactcattttccatcttcactgtattcctataaatgcattaaaggtataaattgttctgagcattgtttcatggtattccacaggtttggataagtagaaccttcattgtcgttttttctaaggcatttattatttccttttcaatccaagagttatttagaagtgtatttcaaatttcccagatacagacttttgttgttgtcatactactgttattgatttcaaagtttattccttgtatagaaatatcctgtaattttttttcaaattcattgctaagtaaggtgtgttacttactcaactatggtaatatgtcaatttttccttacactcccagttcagatcctttgttattttattggtttttttcccttttcctcattgatttgtgacaggcctttgcattttaggaaaattaactctttgtttctcatattctctctctggcagtttttaaagagaatttacatgcaattaatattttaataatattagatgttattgaaaggtaggcttaaaaggacttctgttttataacatttcattagtcattagttaatttttattttatcttatatattcttgaaaatctatgtttatctaaacatttctacgatgttcatttttaacctgtgtagatgaacctttcccatatcactgcgactgtagcttcactgtgacaaaattagaaaattagaacaaagatatttaaattggagtcaagatactatattttccattaaaatgttatcacagctcattatgatattataaaaattgggtcagtcgtggccgggcgtggtggctcatggctacaatcccagcactttgggaggccgaggcgggaggaccacgaggtcaggagatcgagaccatcctggctaacacggtgaaaccccgtctctactaaacatacaaaaaattagccgggcgtggtggcgggcacctgtagtcccagctactccagaggtgaggcaggagaatggcatgaacccgggaggcagagcttgcagtgagccgagatggtgccactgcactccagcctgggcgacacagtgagactccgtctcaaaaacaaaacaaaacaaaacaaattgggtcagtagtgaacaacctgagataggaattggagagccaggatacctcctataactccccatgctccagaccactccaactctgtgaatgtggctgagttattcagactgagccacagcttcctaatctgagggaatggaaggaattcacaacctctcagagtccttgtaagaataaaagaagataactgatgggaacgctgtttgcaaaagaacaaacatctgtttctgttattccattgaatactaaagtattagcctggagtagtctgagacccacatatttcatgccaattttcccaatcacgatctgcctttcttatgaatcctgatccattcacagaacagttctcataacccctttaggaaatgggaaagattggccttcctttttgcaccatatggggaaaaggacagtgctcactaaaagaggaatgtttgctttcttaaaacactggagggaaacctaaaacattttctctagccccttttgcatgtttcctgttaatttctggttcagctacgtctggcaaacgagtgttatttttgctacatttgaagacctccctgaggaaataaactgtagaccttccctcttccatgatgttatttgtgtttagttttgggggaggttttgcttgtttgttttagttttgcagcgtcgcctcagttaaaggcttctaagtaaaactgctgacccaggggtgcaagttatccaaacagtatgccttctcagttcatttggttttagatagtttacttatcataataaacgtgtgcatcttttcaaaagaattcatatgcggagtggaaatgtaagatgtacttcagaagtctctttattacctctgacagaaagggttccctttctccaggagttctggaactctttgttgcatacttttatggcaaaaccatgaaatccatgtttctcccctcaggatgatgagcctccagctaaagggaagaaaaagaaaaagaagaaaaaggaggaagagatcgacattgatgtggacgaccctgccgtgagtcggttccagtatcccttccacgagctgatggtgtgggcagtgctgatgaaacgccagaaaatggcagtgttcctctggcagcgaggggaagagagcatggccaaggccctggtggcctgcaagctctacaaggccatggcccacgagtcctccgagagtgatctggtggatgacatctcccaggacttggataacaattccaagttagtgtctagcggggatttaaaggccaggagagatgaccatcctgagtacttgtctctgcagggaggggtggccaatgtacttctcacttaaggacaatggtggttaaagcttgttcacaaatcacttcgtctgtcatgtcagcatttttctttctgtctctcagaggtgtttttggactgtcgttgtttttgtgtactgccttctctttgcatcaaaattgaaacacaatttttttcctttccttgaaacacaattttaatgcaaagatggtgaaattaatttccatagggaaacacacactaacaaggaatacaacattaatgagcctgtgccctggactgtgacctggactgtgaccttcacaggtgtttctgattttgctccatgcttaggtgggacaggatggctagagggggctggagttgggcgtgcttcccctgggtcagtcaggctctgatcaaaccagcaggtgaggctctggtaaaattggttctcctggccgggcacggtggctcatgcctgtaatcccagcactttgggaggccgaggtgggcggatcacaaggtcaggagatcgagaccatcctggctaacatggtgaaaccccgtctctactaaaatatattttagcccggcgtagtggcgggcgcctgtagtcccagctactcgggaggctgaggcaggagaaaggcgtggacccaggaagtggagcttgcagtgagccgagattgccccactgcactccagcctgggtgatagagtgagactccatctcaaaaaaaaaaaaagttgaaggaacttggaacgtttatggttattgccaaatatttgaatctggatcatgtggggaaggcagtaaactttatgctcaaaattcagcttgtgccaccttctccatgccccccaacttctatcactgtccccatcagtcattagacgccctctggcctgggccctatgacaactatgcctcatccctgtcatagcactgagaatgttggcttctctgtaatcactgtgatggtgaagtgttacacgggcagagaaaggcatacatccgaaatgtccagctggtgacagtccacaggtgggacatgccggcaccaccagcacccagatcaactaagaacctagccggcacccaccagccctcctgtgactcctttcagtgtccacctcccgccaccaccaccaccagcagccccgctactgtggcctccaactccacaggtgctgcatttgaagtcacttttgctgtcttttctatctgcctccctgatctgtgcacaacttgagggaagggactttgtcttctcgtctctatgtccctggggtctgaggggcagatgtggtctcaacctacagctccatttgcagcagtagcagtcagcccacctcctgactgagctcccagccactgtccctggccttccccctttggggacacatccctggagcttcttgcttgcagagaacctcagagcccctccagtgaaggatactgtgtcccgtggctccataagtccttggtggatatgcctgtctaagaaacagcttgcggccactgtggcttcaccctggtcccttctctttccccccagagacttcggccagcttgctttggagttattagaccagtcctataagcatgacgagcagatcgctatgaaactcctgacctacgagctgaaaaactggagcaactcgacctgcctcaaactggccgtggcagccaaacaccgggacttcattgctcacacctgcagccagatgctgctgaccgatatgtggatgggaagactgcggatgcggaagaaccccggcctgaaggtgcgtgcaacgtgctgcgaggcgggccagggtgacagtgacaagtgactctctgccaggctgaactgagcactttctgtggcttatttcatttattccttctagcaaccccctgagggagacgccatgacaatcattgtcttatagatgaggaatctgaagctttgagatgaagtgacatgcctaggatcttagctggtcagcatgggatcagaacctacactcaggtgctctaactccagagccccacctgaccagcccaccaggctgcacaaacccctgccacagtcagagtctcctaatggagccccccataactcagtatgcacacgcaccctggttgggtcgtctacccaccattaaaggagggactggaactctgtttctagattcccttataactctgaaattgtgtattattttaactagtgatgttttcatgacatgggagaaaattacaagaaaataggaagctacgaaagggtttgaaaaagatatagtgggggaaaaattatattgcaatcaaaccctagctcttgggtttactgctgttaactactaggttatcttgagaagagattctaatctgcagataacctagcaatctaatggcagtattatatctattttagagctctccatgaggataaagaaaagactatacgagttacactgtgtagtatggttctggcaaatagagggcactttgtttcttagaaatgtgaatgttatgcttaactgtctaattctatataatatgctaagctgatgttatacataacttaggatattaataaacagttttcagaattccaagaataaagagctctttaaggttttcaggaaactaaagtagatcgcctacatggggatgaacatcaaattggcatcagacttttcatcaacaacactgaaacccagaaggcagcactggagtaaggccttcacggttctgaagggaaggcatttggagcctggaatattttctacccaggccaactattcaaaaagcatgagaaaagaatatctgtttaagacaggcaaagactcaaactatacaccttcaacctcccatgcagaagaattagtttagcaggtagtccaagcaaaaaaaaaaaaaaaaaaaggggaagcatgttttctatctatgagcctgggcatccgggcatccttttgttgtctaggccgagcccatgttagtccttcttttctgagtcacattagccttgcaactcttagttcacataatctcatttatatcaaagttatttctatataaaatacttttggcctacttcactagaggtattatattttatttatattattctattttaatttaaagatttgccttcctcgaaatttcatgtaaggacttttattttattttattttattttatttttgagacagggtcttgctctgtcacccaggctggagtgcagtggcgcgatctcgcctcactgcaagctccgcctcctgggttcaagtgattcttgtgcctcagcctcccaagtagctggtattacagacgtgcaccaccatgcccagttaatttttgtattttagtagagatggggtttcaccatgttggccaggctggtctcaaactcctggcctcatatgagccaccaaccttggcctcccaaaagtgctgggattacaggtgtgagctaccatgccagccaagacttttctttttaaagttaggatcaccaacagtgctgtttgccattcatctaaaaaatttagtgtatgttcttaaattgttttactgcctgcaattctactaatttaccaagcacatgtcacagaacgtcagaccagggataacattccagggctcctaggttattgaataatgttgaaggtcataatttaaaaattttaactatgctgggacatttttctagaattgccacagcttaaaaaatcaatttatgttccgtaggttatcatggggattcttctaccccccaccatcttgtttttggaatttcgcacatatgatgatttctcgtatcaaacatccaaggaaaatgaggatggcaaagaaaaagaagaggaaaatacggtcagtgacacacttgaccctaagcatatcagtgtaatcttgttttcaaaattgttgagatttcttgtaccacagattgagaaatctcactggttaaaggtatttttggaattgtgtttttctaatggtgcctgtgtgccggagtgccttgcatttcccatttagccacctgcctgtcatgtgctgtgctctgttttccaggatgcaaatgcagatgctggctcaagaaagggggatgaggagaacgagcacaaaaaacagagaagtattcccatcggaacaaagatctgtgaattctataacgcgcccattgtcaagttctggttttacacagtgaggcctcctcctgaacatttgacattcagtatattttgaatgctttgatatgttggaatcaagaaaaacttcaagggcttaaaaaagtatctaaaaattcactgaattaaaatgaattatgagaacaaaactgggactaattgagatctctggctaacattggatctcgatatcctgtcacatattgatatatggccatcctagtcccaaatacaccatctcataaggcaaaatagtcacatgctatttgcttaagatgaattcttctgatgcctttagcaatacaaacttaaggaactataattttatttttaaatgaacagagatgactagtgatttaaagagcaaattcacagattccatttttcatgaaattggtggggtcattacaagggcatggctaaatccagatggtaaactcttggaatagggaaacaaatcaaggcgtctcattctgaagtgctcaccaaactgacccgcttggctggcaagccatcctccagccctctctgaggccctgggtctacacagctcccagagtgtggctctctactaacaagaacaggagaggaggcaggagggcagatcagagcgcctctgggggaaatggccgagctgcaggcggtcccagtgggggtggccaggcacactgtggcttgtgcaaccacgtcagtcgggaggagagagacttctcatgaaatcccaagcatcaagccacagcccccgccaggcaggcctcggtgctgtggttgcactggtgatgaggtgagagcagggtatgggacatgaggagctgggtccctggccgtggtctgggcgatgaatgagggtgggctgggggcagagcaaagctctgtgtgggggcccacctcaagggtcagctgagggcctggacacccaaccttgtggcagccaagattgatgatacagtcgaagtcactgctgcccatcgattctggttagaaccatctgagggcctggggtgcacccagcctgcaggagagcccagccatagaggctgctgccggagatggggccaggaagccatcgaggcctctcagccttgggtctcaccccagaccctctggatcgggtggagggtggagtcatcacacattgtgcagcttcgcagggattaggatgcagcccaaagtctgagaacatggctctaatctttcttcaaagagtggatagtggatcttggggtggggcctgcctctctcctggtaaagcttataggcttgggaggcaggatcttgaaaaaaaagaaaaaaaaaccaaactgcccagttacaaatactcagtttttagcacccctcccccaagccttccacaggggcctgtgccagtgagggacccagaagcttaagtttccttggcatcatggtgaatcactggggacaggtgatctacttcagacgtcctcccccaaccccttaactccccgcttttgcctcacccactgccacctccagctctgcctctttccctgccacagagataggggccctgctgtggccacagcaaatcctggacatgccaccagtaactgaggggactctagggtcagctcgcatatctgggtgggcaactcatccacatgtcctctcatctaacttcccagttgtggaaagaatcaggaaggaaatttctgaggcagggaggagtaagtaacattttccagtttccaggaatgtagaagacactccagcaaactattaaaagtttcccgttatcataatgtttgcaacttcatagtttccccatgaggatgacagcaccaaccaatatgtctccatgtagaaaatgaaaagtcagggcccatatcgtgctgaagtataaaatgcctcccgtcctgcctccaggtcttctgtctgcactggtgaggtgcagtgaaggtttcctctcaatgagtcagtccagttggaaacaaagattcttttagatgtgtcaacctgaaagaaaacagcgtttcaaaatttgattgctatgtgattcccccaaacacggctaacagcttgtctttctttcagatatcatacttgggctacctgctgctgtttaactacgtcatcctggtgcggatggatggctggccgtccctccaggagtggatcgtcatctcctacatcgtgagcctggcgttagagaagatacgagaggtggctactccaaaggcctcccccagcccactaaccgctgactgcaaatgcagatatggctccttactgaaaaaacgtttcatgcaaattatgcatgttgggccaggcgtggtggctcatgcctgtaatcccagcactctgggaggctgaggcggatggatcacttgaggtcaggaatttgaaaccagcctggccaacagggtgaatgaaacactgcctctactaaaaataaaaaaaattagccagtcgtggtggtgcacgcctgtaatgccagctactagggaggctgaggtgtgaggatcacttgagatagcagtaattcgaaaccagcctggccaacatggtgaaaccccgtctcaactaaaaatacaaaaattagccggtcgtgtggcagttgcctgtaatttcggctactcaggaggctgaggtggaaggatcacttgaaccctggaggcagaggttgcaatgagccgagatcgcgccactgcactccagcctgagtgacagagtgagagtccatctcgaaaacaaaaacaaaaaaacaaattacacatgctgtgggactttttttggaggtatcacaatcccaagtttattccatttctttatttaagatgtatacatcttgaatgaacttgaacttgcaaatcaaaacacaaggcaaaataaagatatttaataatgaaaacaggtttgaatgcataggaaagcatcagcaaatgctgccagcgacctgagataaaccaattaccgcaactgggcacaaattttggcttagttatttgggatcagagggagaaagagagatacaagagacacttgcacagtgtggtccaaagcccaaagttacaggaaaaatgccatctcttttatctctggactcttgtgcaggagatttatgaagggagggctcccagtcaggaggaaaaggagctaagtgaggtgtggcttcaggtggaccctgtccttggcctaatcctgtagggggctctgagtggactggacactgtggagtctgtctcacctttgggccccacctcaatttgtcattggtacccaccagagacatggctccaagcatctaagagcaagcctcccagaagggggcaggtgtgggcctaacagcagcacctgcagcagatggggtgggcaagcccacctggggaaaagctccaggggatatgggaggggcctagagcgtttgctgcaaacagagggaacaggattttcaactcagtattgcaaaagaacagataccatctcacatatgactcgttatcccagagagctcgagtgaaaatgtaactcccagtaagcaatctctgcagacagcagaggaaagataggccggatacttccctttccaatatcattcagaagttttaattcactaaatttgcttataaagagaaagcatgtatccaagcaaaaaagcaacttgagctgaaaaagcccacagcatcatttcatatcctttctccaactgatatacaaccaatactattattttgcagtaattgttgaccctttcactgaactgaaaaacattattaacctagtccagatagagggaatctgatggcatcggtctaattagagcctgaaaaaccaaaagagcactgaatccaaaattatacttgccaccttctactactgttccttttctagctgggcctcattcaaattctgcaggtgctgcaactggtatttcctgagcggcctgctttaccatcgctgtgccgtcctggccttgctgagggtccaccatacaccgagacactgttctttattccagaaacctgcccccagttataggagagagagggtggccatcggctagtgtgcatgggttgttaaactagtgaatcccttctgtgtgggctgacagatagccactgccccatcctaccacagagatccccaagacctctgcaactgaaggggtaccacctggcatggcaaccctccatcccagtgtggtaccacagacagctgtgccattgggaaggctctgcgcacgcctgtgcatgctgcttgctaaatatcttccattttactctgtggaagtctccccttaagcagcagtgattttgaaaggataatatctcaagtaggggaaaacctggtctaactttcccctaatttctcatgtctaagttgcaaaggaattttgccaaatcaaaacatttcctagtggtattctgccatctccactgggtggactgcccctctgtggggccacgtggggctcatctatgctctagagttttcatcctgtgtgactctggaatgtggagtaacaggcacgtgtccagataattaaaaaagaaatcaaaatgcagctgctttaattacagccagaaggacataatttagaaggcatttcctgagtttgtaaaaccctgaatctaagaatagggaggattccgtggaatttccctttctagatatctctccctgcctgagaagaagagtgtttaaacgttttgagtaggaaaggggccagatgacctggaatgttccatcagtcttattgttccaagattctaagacaagacttctaatacggcatctcagtttattgttctttggggtttgttttcagatcctcatgtcagaaccaggcaaactcagccagaaaatcaaagtttggcttcaggagtactggaacatcacagatctcgtggccatttccacattcatgattggagcaattcttcgcctacagaaccagccctacatgggctatggccgggtgatctactgtgtggatatcatcttctggtacatccgtgtcctggacatctttggtgtcaacaagtatctggggccatacgtgatgatgattggaaagatggttagtagtggcatcctgtgggtatccagagagactttggctgtagttaggacataagaacaggccttgggcatggcttccttcaatttcatttggtttttcttttgcagttggctttttaaaggaaatattctttgctttaagatacacagttctcctacatgttgataacttaataaaatccaatagaaaaacatgagttgagggcctactgtgtatatatacataacatatatacatatatagtgtatatacattcactgtatatatgtgtgtatacatacacacgtacacatgtatatctctctcaatatatatcaggtactcaatatatactgtctcccttcttccataccatatctcaactgtagggtgactaattacgtttgttttttattccttctgatttattattaatgagtctattttgacagcaatataaaagaaaatagcctcgtttttttgtaagagcttacttcactttcccaggacataagagaacatcaatttttgatgcaataggaattcagtagcaaaatagatgtctcaaaatatttacttcttgatggctggaaacatattttcagcattctttagtacagggacatggatttgatgttctatgagactacatccacttcagaatgtatatatatatggccaaaaaaaaaaaaaaaaaaaaccccgcctgatttataacctcctaacatgtggtagaagccggagacaaagggagcccagggccaatccccaacctgtactccagatgatcttcagctcatttactctggcctggagtgaacacaggaagtccatgtgattagaccatgatgacttatactccagaacaggccagagaatatgaaactgaaaatgaaccagcaggtcatccttacattacctaaaagagcttcagtgttaggactggtacaagaagaaagcaagcctcctacatttaggaaggactctttatagggcaagtggttttgagctaagggaagtatgctttagtaaattccagcaagggcctccatcttcagggatgttcaaaattaggaattataccagtttagtatccacagtaaccagggcattgctcagcacttgtgtagtgaatgaataaatgttggtctatactctcaattcattatcgttttatttccttaggtatctgctcctcttcctccttagcatcccttacaaactcccatcttttcttctaattcttccctttctccatttgcagttgtagttactaagggacatgtgtttatgggcaacaacagagaagaagcaagaaggatgaagagcagatgaagatagcaatgttctagaagacattctaggcataaagcattgcatggagtaggaaaaagccttcccagggatgggaagaaaggaagggaaagaggctttcttcgtcctaattaagcactcgtgaagtgcttaattggagacagcaatataatgagccagggtgaacttggcccacaagccaagacagtgagagacaaatgttctccttactcagatgatcgacatgctgtactttgtggtcatcatgctggtcgtgctcatgagtttcggagtagcccgtcaagccattctgcatccagaggagaagccctcttggaaactggcccgaaacatcttctacatgccctactggatgatctatggagaggtgtttgcagaccagatagaccgtaagagtagaattcatagtaagattctcttccctgcttctgaggcagatgatcagttccaaattaatggaagaacatgtattaatttggaaataaaaaatatttgtcactccaccataggcatcaaattattttacaaagaaataagaacaaattatggaacatggattttcagacatcagtcatttcttttattctaaaaataattcactagaattcccttgagctggacctgatggacatcgtgtcacatgaatgcagttctaatgccaatagcctagtttttcttcaacccagtatctccccaccccaggataaggctgatagtgttttccagtagaatgaactagtgaacagagcagagtaactgatacttcccaccatcctcttcttaaagccatcagagcccattttccacatagctacccatttcatacccatttcatcttcactactagagtgctattttgtattatcaaaaataatctggatgttagtagaggaaatgggctatgatcctgcacagatttctggggaatgtaggcccagctcctctgcaggctgagctggtgtcttctggattgaaggaatgtaaagctcaaatgttcttgtacactatttaccaggacagttgaataaatgttccaccagtgaaggaggcacttttagtcccatttccatttcaggaccaacattttcatttgcatgttgtgatttatcataaagcatcagctataatagcatgtctgctgcttccagagctctgctatttgggaatagaaagtttttatcatcttcctctcatatggaatgtagggctgtcagtgtatatctactgcctctaggttagacaataaccagctcatgcagtagcttctttctaacttttataatgtcattctgaccatatcattattgcaagtatcacaaagtcaactattgaagtgtgttagtagcttggtaagccagaacataaaaatctaatttgatttcaaaagaatattagtttaggtagatatacatacacgttaaaagttcctgaattccaggcataaactgtagtatttttattgttgagctcttttttttttaaattaaattgggttatgagagaaggtaaagaggtaaactttaggctgtgctattctcagtaacataattaaatgtaggtttttgattcttgatctattaactaataattttgtagttatttgtgcttatgaggtgtttgtgttggaatatagggagcgcgtgattggttaacctgatcatctgccagtaacatcatgtctttttcacagtatttttaactagtgagcttttgctctcgcttatgacacagggtaaaataaatatccatgatatatattttctagaatgattaatgtatgtaattcttctaaacagatcactgtttctaagtgtgaatcaatatttcccaagcttaaaatatttgcatttcttcacagcaaaacagttatgttgttaaaccacttgttttacttttctctcaaccatcatcttattttctttcctcccctcctgtcaaaacaaaacaaaacaaaaatcctgctttccaatcgtcatgtagtctacgccatggaaattaatcgtaagtttacatggaattgattattctagtctatggaatgtgtttttcaattaccttttccttagctgattactagtagtcttaaactgttttcaaatacttctcttgttttttggtgccagtactttttaagctgtcagtaaaaagtaaagagaaccacaaattcactgttgggatcaccctatttttttaggggagaaatagaccccctatgataaaaagttgcatttcaaatgagcagagggagaaaagattatttttcaaacatggcaccaaaacagttgattaaacaatttgggaagtagaggaaatccctaacccatacaacataacaaaaatattttcaaatttaatgtatcagtgaaaccaagaaaacaaccagaagacaacataagctgatgttaaataattagaagccacaatgactttcaaatggataacgataaagggaaaaaacataaagatacatttgtctgcttaaaaatgaagacttttatatttgaaagccacaataaagaaatgggaaaatgtttagaaatatgacaaataatgactatctctgagcgcagatatgagtttctgacttttttctttgtgtgagttgttttttttttgagacaactgggagtctcgctcagtcacccaggctggagtacagtggctcgatctcggctcactgcaagctctgcctcccgggttcacgccattctcctgcctcagactcccgagtagctggggctacagagtttattttttcccatggaaaaaatattgcttatgaaataagaaagaatcatattaaaaaagaaataggtattgaaaaacatatgtaagagatatttatccttttcattatatgtaaaaagcaaagacaaaactatttttttctttcagctccttgtggtgagaacctatatgatgaggagggcaagcggcttcctccctgtatccccggcgcctggctcactccagcactcatggcgtgctatctactggtcgccaacatcctgctggtgaacctgctgattgctgtgttcaagtacgtgtcacagccgatgaccacatgcttattatttattactgtacagattttccatttaatctcagaacgctcccaagataccaatatatttgcagataatttcattagggtttttaagtagatccaatttttgcagtctctttgttcaaacttaatcagtcttaatgtattcataaatcaagagttgacacttaaatacatttaaatttaatcttggttagtattttaacactttagcatgtattttaatctaatgaaaatattttcttagatgaaagtctcctggggtacagaatatttgattaagtcatgctttttattcatcagcagaggtggaaaaggcaatatgagtttcataagctgttacaattactgtaatactagtaaagcatttttttctgatcatttatagaatacaagataaaatggcctaagaaaaaaatggcttaaagggttaaatcgagtttcttataaaacctgcctatttggcatgttgtgttgagtatgttgaccatgctcaataaatattgaaaaaaatgattttagcttctaagatgaaaaatatagagggaaaaatccttcacagaaatatgcaatcttagaattgaacagggcattggagaaaacctggtccaaacttctggcttgagagatgagaaaactaaggtcagggaaggtaactggttttcctaaggtcccagtattggtagacaatgaaatcatgcacttactgcttcctgttggaagctaaaataagacaaagattgtacctaccccatgtccaaaataacgaaccttcaatcaaataagttcaataactaattaattcagttgaaaaaaaagtagtcatctacttgttagacagaattgaaagtttaaacatgtgaaagcatttagttaaatggcttataccgctacacataggaaattaaatttcctgagtatatgagtagattgtggtgtggtttttcaagaaagcagtacatagcaatttattacacttagctatttatgaatacaatgtccttaagcacagataatccacattgatggataaaccaaaagattggataatcaaggaatcagtactaaagggcactaaaaggccatctcattgagtattttcacttaaatgtgagtaactttgactgctctgggaaatcactataaaaagtaatataactaactgtaaaaatgtcttctttttaaagcaataccttctttgaagtaaaatcaatatccaaccaggtgtggaagttccagcgatatcagctgattatgacatttcatgacaggccagtcctgcccccaccgatgatcattttaagccacatctacatcatcattatgcgtctcagcggccgctgcaggaaaaagagagaaggggaccaagaggaacgggatcgtggattgagtatgtgcagggctcttcatttctaagttgggctgatttcaaaatagtgttcaaattggacatcctcacagaaatctcactcaactacttgctcgtgtgaaaagcaccacactcagtccaactgctgttcttttcaaaaggcttctcattttgtacccattttattctagtttcgttaatttgttagtaattaatattaggaaagccagctcatagagaccagaagttgagctaattctctaaaataactctactctgtaaatttctatataaattcaatgctcctttcaaaacgtcttaatttgttgcatctaaagaaaatgagaaaataatgctatacgtttgactctattcataaaaataagtgcaaaaagttttccaggaaatattacttggctttactttcccagtaaatgtaattttgttttttatgtttaaaagcgggccgtttggctccaactgatagagggttggggcgtatgacaacccctttttagataaaaatcaattggagtagtggcgaactgccttaggagtggcggagaagagagcttaattaaagtggggctgtgaaattctcattgacgccacgaaactgattcttcttgtttttcacgtggccgacacttctcccttcacacagagctcttccttagcgacgaggagctaaagaggctgcatgagttcgaggagcagtgcgtgcaggagcacttccgggagaaggaggatgagcagcagtcgtccagcgacgagcgcatccgggtcacttctgaaaggtacgtgtagcgtccccaccgcgggcccgtgagccaagggtttgctgactcgggcgccccactctatgggggatgccagagttcatttaaacatgcactccgagttctcctgttttatttaaactttaggttttaacgtggttcccacgaaatagtgagaaagttactaggtaataactgtgcattggatatagaagggaatgacatttatttatcctgggccgaaagaaaacctaacagttgactaccttcaccccctaccccaaagtgggggtgtttccgcaaggttaatggaagctacagaaagccatccttctcccagctcttgttcctaacttccctttgcgagcatggtcctccccaggggactgccctcctcatccggcctagctgcttgctgcaccttggcaacacctttcccagcctcacagggcagaggaaaaggctccctcctggggctcccctgagagtgggaactgggaggggtggggtgcagggtggggggtgaggtgtctggccccatgagggtgggatccgctaaactagggcagggtgtgtctttcagacaccttcacatccgcagtacccagcaaggtcagcctaatctccgcggtgatgcttaataaatgcagagtgaatgaatgcaggatgtgtgaaccagtgaatgagtaaatgaagtcaggtcgcgaggtacagaaatggtgacattttccaaacttcgtagtattgctctaccctaagctaggaaagagcaactggcaaagggtagacaggagcaatggaccttcactgtctgcactttttatcacgtaagttttgagagcctttatcatttactaaaagcattttcagcctgctaaagatcttggtgactgataacacgctgttccaaagggtttcactaacaacgtggccagaaggatgagctcagaggagccatgcctagctctgctttctatccttgagtacacagaattaaagtttcctaacagacacattgagagccataaaaacagggtgggacttcaaaaagatattgcagctgacagttcccaaacaattacaacagaattcacagatgcaccttaggtctccctggtgcatgttgaggccagtgaactctgccccagcccacaggaggggagatggcaactgtgggtccctggcctcggttccctcctagacccagtcaccttgtgacccaaccaaatccaaccagctaaactctagggttacctgcaccacctttcttccttaccaaggtgaatttttaataaaactttgaaatgtttctttgatgctttaacagtaattgctaaactttcaaggtataaaaattatttcttcatgagaaagttaaggtaccccatgtaatccaatttccactttttagttagacattaacttgaacgtaattttaaccagtcatttacaatggagattgtgttttgttttgctctgcctccccctctcccttccccggcattccttggatttttaccattcttggaccaaagctgcaagagtgtggttatcaggtcactaccaaattgcatttttctctgggggctctgtgcacacgtaatagggatgaaagtgtgtagggcagagaaaacatgctgcttcctgtttccctcggctgagatcccaggagcgatgggagcacattcttgcccctccatttcccttggccttgtcaggctgactcacaggtgaatgcccaagacagaaagaggagaaggcttgaggagaagggagttttccttccctcttagccaagccagctgagaagcaagggataaggtgggaggatggaaataaaagtagctatttgggcacctgtgactactttaaaaatcacacttgaagtactcaagcatttctgccatttctttaatattctttctatataaaattagttttattttctgcatcaccatttcccatttgatgattttcctgctcttctctcggtcgtgtcttcgccagcactattcagtctgtagggtctggttaggagcatgtcagcccctgccttgtctccctgttgtcttggtagctttcagagctgagctaccaattctcatgactcagttttacaggcgtgttcacacaggatgggtacccattaatcattctcctccacgcagggtgcttttagtgcttctgtgcagaaaccaaattcatggttctctcctaatgtttggaaatttacctataaaatgctaacaatttaaccatttattttttctcaaaaagttccaacattttgtaagatccaacattcagtcctgcaatgagatttgcaatacgattcagcattgattgacacaacactgggtcagtcctaccaaccacgcccacttagatgtcataggggccctgctctcagggttctcctcccaaacttgcactccagtctctgtgaatggcatcgccattaagctcagttagcaaactggcaaatcattgtggcacctccctcttcttcactaacaatcatcaagttctgtttacttcccctcgtgaatacatcctgatccacttatttttttcatccctaccccaacgcacctagtacaggcttccatcattttccacttccattcctgtagctgcccctacctgagctctccatatttgtttctgctgtttcaatccatgttgcactgtcagctctcatggggtcctgttccctcctgcactggctttcctgaaaaaccctctgtggcccccactgtcctcaggcctgcaaggccctgccctctctctggctttgccatgcactatcttctccttcatgctctgtattccatttctctttcatttcctcaaagcactgcttccttcctgccacaggggctctgcatgggctgtgccctctgtctgatgcacctcaccctccttccctgctcctcttccttggatctctgcccaaatgccaattccttatggaaaacttcaccacctcacaccttagactaggtcaggaccctcaggccttaagctgcatgaaggcagggccatgtctgggtttggtccaccatgatatacctagagcctgcacatatccacatagtaggagccagacttttgtttctgtttttgtttttgtttttgtttttgagacaaggtctcgctctgtgcccagtgcagtggcacaatcaggtctcaccacagcctcaacctcctggactcaagcgagccttctgcatcagcctctgaagtagctgggaatacatgtatgtgccaccacgcccagctaattttttttattttttattttagtagagaggaagtctcactgtgttgcccaggcaggtctcaaactcctggcctcagcaatcctgcctcagcctcgagatttttttgaacgaatggatgacttaaaagcttttctcctgattcgaatataaatttctatcccatccttaatgagttccctcatggaatatcaaaaaggaaaccagctatgctccctccaggttcaagacactggttttactataaggaagtaggagcagactcaagagccaaaggattgtgccacaggaaggataacaagtgttggtgttggcaccatctttttgctcaaagggataacatcaaagagccatgagggctggtgggataagaacattttataaacaactccttttttattattatttgtagaaacagggtctcactatgttgcccaggctgatctcaaactcctgggctcaagctatcctcctgcctcagccttccaaaatgctgggattacaggcatgggccaccatgtctggtcaacttctggcagcatggccaaagtagacctcgtcaacccatgtgttctgtcctcattgctccaggagaatatttggcaacatgagtccttatcattgggagatttgaggctatctgtgtcttctgcacatccactacggagcacactgttctctttgtggttcagcatcccttatcacaggttcacaggttcaagagcaattgggctagaaagaatctttcctgacaaaattttgtcagagacccaacttccttttctcaatgagaattatgttatccagtgtgttttccttttttccatggcttcaaggaagcttaacaccaaacttaatattaaattatcaaatatattactataggattttgaaatatgtggggtacgttgcctcttctctgctttttttatatcgtctacctccatttacatacattttattaatgtctgacatttcacaatatgcaggatataactcataaattatacattttaagtgtagttggccttgtgcttaagaagctatgggtcttagatgagctaaacctataatagcattttctgattcccccaaaactttctggattaagtggtttcttgtcagatttgtggatatggattaaagtgttttgtcttttttttttttttttttaattctagagacagggtactgctttgttgcccaggctggagtacagtgggatgatcatagctcactacagcctccagttcctgggctcaagtgagtctactgcctcagcttcctgagtagctgaggctacaggcgtgcaccaccacacccagctaatttttgcatattttgtagatacaggatctcactatgttgcccaggctggtctggaactcctggcctcaagcggtcctcccgccttagcctcccaaagtgctgggattacaggcatgagacatcatgccccatcctggattgcctgcaggcttgatgggaaatcagcaatttgtggctttgaaatctttttatttggcatcctcttcccatgtgaccagaaagagaaatggctggtaatggagacctacctagaagaaacaagatagtaactagaggaactgaaagagagatcagtcttaggaaggaggtgggggattctttgcatgtagagaaggttgtagaacggcaaatgcgcagtgatggggaagacatttggggatgatcctgtctgaataccttaatcttctaaattcatagggttcaaggttgcttggataataggaaggagatggcttaaatgttgaaattttgatgtgccagtggatgacacccttgttcctgatctgactttgaaagccaattcagagacagatgcagacttcaggaggatagagaaaaaaaaatcagttttattagtaataaaagttgtactggagggtgtggcttcgttcttgcctactactcacccagaattaggaatacccacttagccacaggcagcaccagccaccacaggcctcgcttcccacaggcagagtttagcctgcgcgctaagcctaccagaagaccaagacagagagacaagcatgcagtatcctggtccccaatctccaaccaaatgagccgtcctcctccaaaataaataaaggcctggaatgaggtcagagcattactaatgaaaagtccacatacatagaaagaaaaactaggcatgggcaaagtgtacctctccaacaatcaacatcactgacttaaagccagtaggaaggattcaagtcaagtgagttcacttttagggggaatatggcaggaaaggagataaccaggattgcttggcaggaataacaaagatgcaagttaaattagataacatggctttgtactgggccaggtcagtgtggttcccatgaccttcatcggtgacaccgtacagccgaaaggcagggatacagaaagacaactgtacatacggcatggatgctgaaggaggccatgcgcccaaaaaccagtctgtggagagacctcaaagatgctagtgtttgcaaatggcagcataaacatacgacattgcctccaggcaccaaatatccttgcttagtcctggagtcctggtagcaataggttgggggttagggattggcactaacgtgttgcaagtaagggagaaagaacataggttattaatgagggcttcacttcgtggccaaccacagaatctggcctgaatagaaaacagaacataaccagaaaaggctaatgattagatgacttgaattctataaacccaggaagtctggggtatgtttaaatgaggcagcatacagctagaatcccagaaagcttaatgttcttttagtaactattcagtatactgtttattacagagaatgaaaaagccagaagaaagacatgagtcttggccgggagcagtggctcacacctgtaatcctagcactttgggaggccgaggtgggcggatcacttgaggtcaggagttcaagaccaacctggtcaacatggtgcaaccccttttctactaaaaatgcaaaaattagccaggtgtggcagcgaaaggcctgtaatcccagcactttgggaggccaaggtggatcacttgaggtcaggcgttcaagaccaacctggtcaacatggtgaaaccccgtttctactaaaaatacaaaaattagccaggcatggtggcgaaagcctgtaatcccagcactttgggaggccgaggtgggcagatcacttgaggtcaggagttcaagaccaacctgaccaatatggtgaaatcctgtctctactaaaaatacaaaaattagctgggagtggtggtaagcatctgtaatcccagccactcgggaggctgaggcaggagaatctcttgaacccgagaggcgaaggttgcactgagccgagatagtgccactgattgcactccagcctgcgtgacagagactccctctcaaaaacaaacaaaaaaaagaaagacgtgagtcttgttcttttatgattagtcttcatttagtctttcacacataaaaactctgtaagtaagcacaacaaggttctatcctggtgttcttcctataactactaaatgtaaaaggcagccctgtatgaagaagtggatggaaattaaaatagctggatgtaaaatttagagtggataagacaactttatgatcagtagttctggaattaaattatagggtaggaatagttttagaactcaagtatagaataccatgggatcttgaaacaggggtttcttcaagtatgaactggacctagctccactaacatcatgtctttatgttaacatttaactctatcattaaggaaatgttcccatataatttatgagattccttgcaggtgaagggcaactgtttcccatgaaaagataactgcatataaaacaagttttaggctgggcacagtggctcacgcctgtaatctcagcactttgggaggccaaggtgggctgattgcttggggccaggagttcgagatcagcttggccaacatggcaaaactccatctctactaaaattacaaaattagccgggtgtagtggcacatgccagtaatcccagctactgaggcacgagaatcacttgaaccggagaggcggagtttgcagtgagccaagattgcacccctgcactccagcctgggcaacagagtgagactctgtctcaaaaatttaaaaaggccaggtgtggtggttcatccctgtaatccagcactttgggtgctgaggcaggtggatcacctgaggtcaggagttagagagcagcctgaccaacatggtgaaaccccgtctctactaaatacaaaaaattagctgggcatggtggcgcatgcctgtaatcccagctacttgggaggctgaggcaggagaattgtttgaacccaggaggcataggttgcagtgaaccgagactgcaccattgcactccagcctgggcaacaaaagtgaaagtctgtctcaaaaataaaatgaaaaataaaataaatttaaaatttaaaaggccaagtgtggtggctcacgcctgtaatcccagcactttgggaggccgaggcgggcagatcacctgaggtcaggggttcgagaccagcctgaccaacatggtgaaaccccatctgtactaaaaattcaaaaattgccaggcgtggtggcacatgcctgaaatcccagctgtttgggaggctgaggcaggagagttgcttgaactcgagaggcagaggttgcagtgagccgaggtcgcaccactgcactccagcctgggcgatagagcgaaactccatctcaaaaataaaataaaataataaataaataaacaaataaataaaattaaataaaacaggttttaacaactggcttactacagaactccagatgtttcagtccttcctaggaaagacacacagggactcttaccacaaggacatgagtttggaccttatgtttaatagacaagagtctatgcaaagtccaataaagttatgccatacataggtattctcttggaagttaatgcaaaagttccacaaattcaggtattgccatacctattatttgaatgaaacagaacacattatgtacaaccccttaacaaaaagtatgttttcatttaaccaccttcaggcttagtggcatcatgttcaaaatcaaatatccttaataatagatataccccaatatagagaagatttgcaatgatattcacacagccatgtcctttgacacttgtgtagcatttacagttcacagagcacacagtttcatttaattcatttaatttagttgctgtcatgctgcaactgttgttaatgtttgataaatcactccccagggacagaagtacaataaagaggggctggtggagtagcttcatcccgaatgccaatgtggatgggcacatctcaaagggaacactgacactggccatatgttaatcagaaacagcttttgttttttctcaaaaccaaattaaacaaaaagagtcatgacatgtaatatcagttgttaatctggtacaatcttttactctattttatttatgtattttgagacagagtcttgctctgtcgctcaggctggagtgcagtggcgtgatctcggctcactgcaacctccgcctcccgggttcaagcaacctttgtcctgcctcagcctcccgagtagctgggactacagacgcacgccaccatgtccggctaatttttgtagttttagtagagacgggggtttcaccatgttggtcaggctggtctcgaactcctgacctcaggtgatctgcccaccttggcctcccaaagtgctaggattacaggcgtgaaccaccacaaccggccgactttcttaatttaaaaaacaagttttttttttgtgtgtgtgtgtgtgtgtgtgtgtgtacgccaggttttgagactgattagggcattcaggtgtatccttttaacagaaaagcccaaagatttaatctgtgagtcaaaagatgaatatgggcgtggaggatcacagctattattaatcatgactgattaagcacatgcggttctgggctcctcgtgactttagtagcagtacacatgatgcagttaaggacagagcaaatattgtaataaatcaagtgcagcttaaatttctattcaaagtcaggagaatgattaattggggcccagacagtttatagatttcatttgtttatagtttcctttgatacaaaaggatggagagtggccctcaggaattgctcttaggcctgccagttaagaaatcatgtatttggtggttagaaaaatggcctcattaatgaccttttcaaaagtattcataagtggaatttttttctgtgaagtcagtgctaccataatgtgaaaaataaaaacctagtggagctatttatagcatctacaagtaaatccaaacccagaaatagttacagaagccacaaacttcaattagagggaaaggaagataatcaacctgatcagaaatcagtgtcaccatgtgtaagaaagcacactttgcatcacaaaagtaccactattcaaagaaatcatttattagtgctgaatacttgttatactaaaaacatagttataagttatttcactatgtgatttgaaatatttgagggtattggcatattttgtaaagtgaatattattttgaaaaatttcgcaaaccctataataaataacacagccatgataatctaattaaatcatgcctaaagccaggatagtaacgtacgtttacatgcaatggctgaggtccctgacatcaccaagacagctttcatttatctagttcttccacaaacatcagaggtagctgaaagctctaggacaggttttctcacagctggggtcatcaaatgccttggcatttggggttctcaagttctaagattattttattttttaattttgatgatgacggcatgtttgcaaagggtccttgaggaaatgtggggatgaagaacaagatgagacaggatgggaagatgagggcagattctcaagagctttgaatgtatatgagtaacagaaatctctatagggtgttaagattaagggctgccatggatggaaggaaagagttaaagctacattttcatagcactttacatagtatgaggaagtgtcaatgtccaaattgtagaatagggttgccaatggagattataaggttttcctttaatacactctttggtttgttcattgcattcaacactgcaatgaaattgtgtttttatcttaagtgtgatgggaagctgctattgttttaaagcaaagattgacgtgcttgtgtttctgtgctatctttttggagtgagaagacattggaggcaaagaggctgttccttataactaacattttttgctttatcagcttggggtacaacatgaggtcatatatcttttttctttttctcttcttttcttttttttttttttaagacggagtctcgctctgtcacccaggctggagggcaatggcatgatctcggctcactgcagcctccgcctcccaggttcaagcaattctcctgcctcagcccccaagtggctgggattacaggcgcatgccaccgtgcccagctaatttattatttttattttttagtagagatggggttttgccacgttgttcagactggtctggaactcctgacctcaggtgatccacctgcctctgcctcccaaatgctgggattacaggcgtgagccaccgtgcccagccaaggttatatatcttttaatattaaatgaaattattctttgacctcatctcatctgcttataatctcatctgtttattccaagagtacctttttccctttctattgtcccatagccccacccccaccccctgcctcaagtcaggtgcaggaaatccagtggtctggtgaagtccctacccactgcatcaaaattcaagagggtgaagtcaatcgttgctctttgctttgatttgagccccagctttctggttggaggatagaaaacggaaactctgaggaactggagatatcagggagatagtgagagggggaacttggaaaagtaatgccataaagttatgaactccagagctcacctgcagactgtgtctgtcaggggtggaggagtctgctccttattcacataccaaaggcattgaatggggtgacatgaacaaaagcaggtagagtaaggaactctggaattctgccccaccataaaagcaacaacaaagttggcaaaaactgtcagagtctatatcttgtggcactctggaaattaagcaatggcttattaagcaacctagggcattcttatttaaacaaaatggctggatcttgataagaaaagtgagctttgtgacattttaacttagccctgtcctatcctctgctctccagttgagtagtcaccttgaaaacaacaacctgcattcctagtaccagtaggagcagaaagaatctcatatgcaaagaattataattacttgttttgtaattacagggcagctccttgaaagcctagctgaaaggttcgtctgtatttcacctgagttggaacaggcccagtactaaagcttctagttagaaggggtggaggaagggttgtcaaaaacatttacaggcaaagggtttagtgcttgctccctgaggtgacggatgacagctggggcaaacaatagactaaccaaaaaactagggagaaaaactgatgtccataagagctttgaaaagctctaacacattcctgggaatttagaaagctatgtgcatgcatagggctgtgtgtatactcaggaagacctgagaaggctataagctcatttctggctgacttgatcttgaggctctgtgcaagcaggaagtgaaagctaaagcaaagatgtaaactgcctgagtgttgaagatgtgcccctatatacacatacagcttctcagaaaagactagaagattttgttgtttttgttccacacatttaaggaaatctctaagtattaactgaccactaagctaataaaatacaaacttcagtggccacacaacataaagaatatagactttacaatattatttcagaaaaatcactaagcaaacaacaactacaaaaatcactaaacaaacaacaaacaacaactacactaaacaaacaacaactacactaagcaataacaacaagcctgagaggggagagaatctgatttctagaattgccacattataatactcaacatgtccacttttaaataaaaatgacaaaacatgcaaagaaataagaaactatggtccacacacaggaaaaaggacaatcttaaaaaccatcccttaggaatcctggatattagatgttttagcaaagagtttaactcaactattttagctattttaaatatatttaaagacctaaaggaaatcatctctaaagaactaaaggaaagtatgagaaggatttttcaccaaataagggactatcaataaagaggtggaaattatatcaagtagtagacgaggtctcaaaaaaaaagaggtagaaattatatatatttttaaaaaaataggtcaggcacagtgactcatgcctgtaatcccagagctttgggagaccaaggagggaggattgcttgaagccaggagttcaagaccagcctgggcaacagagcaagacaccatctacataaaatcatttttaaaactggacaggcatggtggtgcatatcatggcaactggcagagcatggtggtgccggtagtcctagctacttgggaggctgaggtgggaggattgcttgagcccaggaattcaaggctgcagtgagctgtgatcttgccactgcattccagcctggacaatagagcaagacagtgtcaaaaaaaaaaaagaaaaaaaaaaagaaaaagaaagaaatgaaggaagggaaggaaattctgacattggaaagtacaataactgaaatgaaaaattcactctagaggcccaatagcacatttgagcaggtagattaaagaatcagcaaactggaagataaatcagttaaaaattacccagtctaaggaacagggggaggaaatgaagagaaattgaacagtctgaaacctgtagaacaccatccagcagaacaacataggcatcatgagagttatagaaagagagaagggaaactggcagaaacaatatttaaagaaataatggccaaaattttacaaatttaatgaaagatacgaatctacatatccaagaagctcaatgaactccaagtaggataaactcaaggagatccataccaattaacgttatagtcaaactgttaaaagccaaaggaaaagaatcttgaaagcagcaagagagaagcaactcatcacatggaaaggatgcttaattagattaaaaaagctgacctctcatcagaagccaggaagaccagaagaccttgggatgacatagtcaatgtgctgaaagcaaaacaatgtccactaaaaattatatatgcagcaaaactatcctttaaaaatgaaggataaattaagatattcccagataaccaagaactgagagaattcattactagcaaacctactatgagggatactaaagatagtttttcaggcagaaatgaaaagacataagacaataacctaagatccacatgaagaaataaagaggaccagtaaatttaactacataggtaaatataaaaggcattataaatgtattttttgtttgtaactactttttattttctacatgatttacaagacaaccacataaagcaatcattacaaatctatgttgatgggtacacaatgtacaaagttgtaacttgtgataataacagaataacatggggggaggatggagctttataagagtaaactttgtgtatattattgaaaataattggtgttaggccagatgcaagggctcacacctctaatcccagcactttgggaggcgaaggcaggtggatcacctgaggtcgagagttcaagaccagcctggccaacatagtgaaaccccatctctattgaaaatacaaaaattagcctgtgtggtggcacatgcctgtaatcccagctactcaggaggctgaggcacgagaatcacttgaacctaggaggcagaggttgcagtgagctgagatcttgccactgctcttcagcctgggcaacagagtgacactccatctcaaaaaaaaaaaaaaaagtaattggcattaaattaaagtagactgttataaattaagatgttactgataatccccagggcaagcactaagaaaataactgaaaaacatatgataaaagaaagaacaagagccaggtgtggtagtgcatgcctgtagtcccagccactcaagaggttaaggcaggaagatcacttaagcccaggggttcaaggccagcctaggaaacatagcagggccccatatcttaaaaaagaaaagaaatactaagtgaattaaaatgatacactagaaaatacctatttaacacagaagaaagcagtaatgatggagttgagggacaaaaaaaaagacataacatatagaaaataaatagcagtatggcagaggtaagttcttccttaccagtaattatattaaatgtaaatagataaagctctctaagacagagactagcacaatgaatatttaaaatatggtgtaattacatgctatctgcagagactcacttcagattcaaagatttttaaagttttaaagtaaaaggatggataaagacatttcatgcaaacagtaataaaaaaatagttggagtggctacacctatcaggtaaaatagactctaagacaaatattgttactagagacaaagaaggacatgatagacatgatataatgattaaaaaggtaactatatcaaaaagatataacaattataaacatatatgcacccaatagcagagcctcataagatatgaagcaaaaactgacagaattgaagggagaagcagatagttctcaaataatagttgtaggctctaatattcaactttcactaatattagaactagacagaagttcattaagaaaatagaagccttagccaatactatatgccaactcaaggtaacagacatcagtagaacactcaatgacagcaaaatatatattcattttataagcatatggaacattttccaagatacatcatctgttaggccataaaacaagtctcaataagttttaaaaagatttaagttaaacaaagtgtattctcaggccacaacaaaataaaatgataaattaataacaaatgaaaatttggaaaatttacaaatatgtgacaattaaacaatacactcttaaataatcaatagatcaaagaagaaatcacaagagaaattagaaaatacttcaaggcgaacaaaatgaaaacacaatataccaaaatttatgggatacagtaaaagcagtattcagaaggatatttataactataaagacccacatgtaaaaagaagaaagatctcaaagacagtaagaactgaagtaatgaccagactgctaccaaggtcccagactgactactgggctgcacgcacataggtcagatctcaatagcactacaaagactttgaaaactgaactggcattggaatcacagtccacagaaagcatgtcagaacttgcagcctgaaactaaccaggttgatcacctgctaaaacaaaacaaatcaacattctccatgaaaattaaacaagattcagagtcatgtggtataatattcaaaatgtcaggctacaatccaaaatcatttggagtatgcagaatatagaaaatctcaactcacctggggaaaaaagacaatcagtaaatgtcaatgtcaagataacacagatgttgaaattatctgacaaaggctttaaagcagctattaggaaaatgctttaacaaaattgcaaaggctctggaaactaatagaaaactagaaagtctcagagaaagaatagaagatattaagaaaattcaaagaaaattttaccaaaaaataaagtaagtgcaatgaaaaattcattggataggctcaatagcaaaacagggattacagaggagagagtaaacttgaagatattacaacagaaaattactcaatttgaacaagagagtaaatgggctaaagaaaaagcccaaagcctcagagaagtgtggggcaataacaaaaggtataacatttgtattataagagtcccagaagagaaagagcatgatgcagagaaactacttgaagaaatcactgaaaacctcccaagtttgatcaaagacgtaaacccacagattaaataaatgtagagaatgctaaataggactaactcaaatgaatccatatcaaatgaagggccacaaactaaagacagagggaaaaaaattgacagcaaagaaaaaaattgaccagagaaaaatgatacattacttactggagaacagtgatttgaatgatggcagatttctcatcagaaaccttggaggtcagaaggaagtagcactatgtttttaattttaaattttatttattttttgagccgaggtctcctgtgttgcccagactgaactcaaacacctgggctcaagcaaccctcccaccacaacctcccgagtagctgggattacaggcacaggtcaccatggcctgcattatgtttttaaagtgctgaaagaaaaaaatgatcaacccagaattacatactcaacaaaaacattcttcaaaaatgaaagtgaaaaaaaaaatcagacaaagaattcattgctagcagaccaattctaaaagaataactataggaaattcttcagacagaaggaaatgataccagaattgaacttggaacatcaaaaatgaaagaagagcatcagaaataataaatatgttgataaacataaagatgagtcttctctttctgagttctttaaagtatatttgacagtcaaaagcaaaaattgccatactgtctgatggcattttcaatatatgtggatacaatatatgacaactgcagcacaaagggctatgggaaagggacctgtatggtagtaatgttcctacattcaaattgaagtggtaaaatactgatgctatgtatactgtgaaatgttgctatctatttgtaatccctaaaacaaccactgtaaaatgtatagtaaatgctgtggtcacttcccacctcatttcctgaggccatcatcaccatgataccaaaaccagacaaagacaattgaaaaaagaaaactacagaccaatattcctcatgaacatagacacaaaaattcacaacaaaatactagcaaattgagtctagccacgatcaggtagtttatcccaggaataaaaggctaggtcaatatttgaaaacaatcaatgtaatccaccatattaatgatttaaaggaaaaaaccctatatgtttctagcaattggtgcagaaaaagcatttgatgaaattcaacatcatgatgataaaaatacattttataaaagtctctcagcaaactaagaacagaagagaacctccttaatctgacaaatggcatttacataaaatctatagctaacatggtgaaagacagactgctttctccctaaaactgggaacaaggaaggatggccactctcaccacttcaacagtgtactggaagtcttaggccatgcaataaggcaaggaaaaaaagtcttctgtcttggagagaaatacataaatacataaaaccattcctatttatagatgattatctatgtagaaaatcacataaaatctttaaaaaacaaaatgaaacaaatgaaaacgtcctagaattaataagtgaatttaacaaggctacagagtacaaagtcaacaaaaattaatcttatttctatataccatcagtgtgtaattgaacattggaatttttaaaataataccattctcacagagctccaacaaaaatgaaatacttaggtataaatctcgtaaaatacgtatgggatctatatgcagaaaactacaaagtgctgatgaaagaaatcaaagatcacttaaataaatgggaggatataccatattcatgtattggaagactcaacgtggcacagatgtcagttctccccaagtttatctgtagatttaacacaataccaatcaaaatcccagcaggatattttgtagatataggtcaactgttgttgttgttgttgttgttgttgttgttgttgttgttgttgctgcgctgctgttgttatagacgaagtctccctatgtttcccaggctggtctcaaactcctgagctcaagcaatcctcctacctcagtctcccgaagcactgggattgtaggcatgagccactgtgcccagctatgtcaacttattttgaaaattaaatggaaaggccaaggaactagactatgtaaaacaattttgaaaaagaagaataacattagaggaatcacactatccagttttaaggcttactgtgaagctacagtaatgaagacagtgtggtcttggtgaagggtccaacacatacataaatggaacagaataaagagtccgggagtagatctacccaaatagagataattgatttctttccccaaaggtgcaaaactaattcaacgacgaatggatcatcttttcaactaatggtgttaggacagtttgacattcttatgcaaaaaatgatctcaacacatacaaaaattaactaaaaatggatcatagatctaaacataaaacacaaaactataaaatgtttggaagaaaacataagagaaaatcttcacaacttgggaatagacaaaggattcttcaatgcaacaccaaaagcataatcatgtcaatcatatatctgacaaaagacttttatacaaaatatctaaagaactctaaaacccataatatggaaaaaatggcccaataaaaaaatgagctaaggattagactagacacaccagagaggacataaggttgttaaatatgtacataaaaagatgctcaacatcattagctatcagtgaaatgaaaattaaaaccagaatgagatatatctacacaccgaatacaagagctaaaaataaaaaaaattaaaaataacaatagccaagaaggatgctgagcaactggaatttgcatacactgctagtaggaataaaaaattgtacagccactctgaaaaatggttgggcagttgcttataaagttaaacatacatttaccctatgaatcagcaatctcggctatttaactcctaggtatttatcctacagaaatgaaaacatgttcacacaaaacctgtacatgaatgtttatagcagctcttttcatacttgccaaataatggaaacaacccaaatgtccttcaacaggtgctgtggcacatccatattagaaatatatctttgccaggcttggtggctcatgcctgtaatcccagcactttgggaggctaaggcaggtggatcacctgaggtcaggagttcgaggccagcctggccaacatggcaaaaccccgtctctactaaaaatacaaaaattagtcaggcatggtggcgggcgcctgtgatcccagctacttgggaggctgaggcaggagaatcgcttgaacctgggagacagaggttgcagtgagcggaaattgcgccactgtactctagtctgggcaacagagcaagactccgtctcaaaaaaaaaagaaaagaaaagaaaagaaatctttaagagagcatcaaccttaattaaagggaaagccaagtgaattacttggatctggaatgcttctgtattctgtaatgtgctgaaaaatatttttcactctgtgctgaaaggaaagctggattaagacttagaaagctacacaaataacttctttgctgattaatcatatctcactatgagctctatcatgcatgatggattctcttgtgtttttatgccattcaatgtgtaaatagatgtggggctcttgtcaaattgattcctagatagcctttctctgtctgaaatggaaaccactctttgtgtgggtgtcaaggtttgtgaaacatgttttaaataattatgggaagtcaccaaccatggttaacaaaggagatagatcctcatttatttgtcctttatgttaatcatttcagatgtaagtgaacttaaactcatttttatctttcttctttcatacgtactataaaactcaatgcaacttcccatcgtttggcatagctgtttaaaatttgctgtatccacgttgtagctgttcacaagctccaaacaagcaactgacaatttctctgaacccagggcacatcattaagcattgtttcttccacagcttcaatgaagggagcagcagtagggatgggagatttgagacaccaaaaaaggagcttggtaactgattcaatgcagaggggaggggagaggagagaagtgaggggagggagttagtataagggagaccaaagaatccaatgactttgaggtttgtttttcatatatgagtggctgagagtgctgttatctgaattaggtaataaaggggaaaataggtaaaactataaaagatttgaaaggaaagatattcatcttcatttcaccagtgtatttatttagaaaagtttgcacagcggcaatatctcttactgtatgtttgtaaaggaactcaagtttgactagggcaatgtggggttttttttgatacaaaaggaataatcagggtaatagaactgaacggagtagggagcctttatttatttatttatttatttatttatttattttttgagatggagtctcgctctgtcatccaggctggagtgcagtggtgcgatctcggctcactgcaacctccgcctcctgggtgcaagcaattctcgtgcctcagcctcccaagtagctgggattaccggcacacaccactgtgcccagctaagttttgtgttttcagtagagacagggtttcaccatattggccaggctggtcttgaactcctggcctcaggtgatccacccgccttggcctcccaaagtgctgggattacaggtgtgagccactgcgtgcggccaggagccattatttttaatgaagaacaccaagtcttactcagaagtaatggaaagttaatagtgaaaaattcttctgttggtctctgaaatgcaagaggagagagaacccttagaacctacagtgcctgtgatacagaggctttaaaaaaaggaagccaggacttctcatgcatggtgaatttggtcctccctggtggcaaacgtccaggaagccagacccttcctgctcaaatgatgtggtttcctatagtacatataaatagttctcaccccaagaaaagagttaagaatagaagccaaggaaccacacatacaaacacagacacatcagagcacagttgtcaatgtggtcaacagaagagtggcattagcaaaaaaaaaactctgggaggtggggcaaggtagccacagaagcagcagggtgggggtggagttcaggagatgcagtcaagcacagagctgacttagcgatgcaaacagtggcaggcaatctgctcagaagacaaaagagcggggtggctgaccaccgtgaaatggatggataagaggagagccagcagtacgagtgaggacatgtataaggatgtgcagagaaggtagcaaagaccttcgtaggtcatacagactgcaatgcaagccaagtctccctatgtttttaagaaagctgggagaaaataaaagaataatggaatcagacctaagtgtttgccatcacacagggatgaaccagccagaacacagtagccaggactcctagctccatcctggggacaaattcaacttttagaaagcaatcctcaatcctgggcataccttgcctcttagagttaaattcctattgaaataattcatactgtatgtagtaaaatataaaacaaagtctgtaccagtggattttaggccaggcaacattatggtttcataggctgttgcccgatcttctaagaactgaaaaaaaaaaaactaatagcaggcatttataatctcccatgctcttttttgtgtgtaaccttaaggaaatactaattattaaatataaagaataatttaaagtttttggtattcttcagacaattaaatcacctactatcctttaagcaaactatctgataatctgaacttaattattaacagtttattttctgaatcccttgaacctcaataaggattttaattttatttattttgttataaccattcactgctgacagccatagtcaaagctctaaaaactaagcactagtagcttctgttattactacaggcagcatgatgtaccagctaagagacaggcaccggagtgagtgctggagctaggctgcgtgtgctcaaattcctgctccactgcttcctacctttggggaaattacttatacgctccatgacttaatttcctcacctgtaaaatggagatgataataatagacctacttccaaggactgttctgaagattaaataagcctaggattgaacctcagtaagtacctgttagtgagaacattatgctcttagaacaatgactgagcagtaagtactatatgcattaactatttatttccattattttctggtggctcctcatggtaattcgagtagtcatgttaggggattgtgaagcttgtaaatatactcaaacagttccatatgtattaaaattctgaaaaatcacatagcaatgacattatcttttgatttttaatatccacttaatctcagtttaataaatctatccctttatattcaccagagttgaaaatatgtcaatgaggttggaagaaatcaatgaaagagaaacttttatgaaaacttccctgcagactgttgaccttcgacttgctcagctagaagaattatctaacagaatggtgaatgctcttgaaaatcttgcgggaatcgacaggtctgacctgatccaggcacggtcccgggcttcttctgaatgtgaggcaacgtatcttctccggcaaagcagcatcaatagcgctgatggctacagcttgtatcgatatcattttaacggagaagagttattatttgaggatacatctctctccacgtcaccagggacaggagtcaggaaaaaaacctgttccttccgtataaaggaagagaaggacgtgaaaacgcacctagtcccagaatgtcagaacagtcttcacctttcactgggcacaagcacatcagcaaccccagatggcagtcaccttgcagtagatgacttaaagaacgctgaagagtcaaaattaggtccagatattgggatttcaaaggaagatgatgaaagacagacagactctaaaaaagaagaaactatttccccaagtttaaataaaacagatgtgatacatggacaggacaaatcagatgttcaaaacactcagctaacagtggaaacgacaaatatagaaggcactatttcctatcccctggaagaaaccaaaattacacgctatttccccgatgaaacgatcaatgcttgtaaaacaatgaagtccagaagcttcgtctattcccggggaagaaagctggtcggtggggttaaccaggatgtagagtacagttcaatcacggaccagcaattgacgacggaatggcaatgccaagttcaaaagatcacgcgctctcatagcacagatattccttacattgtgtcggaagctgcagtgcaagctgagcataaagagcagtttgcagatatgcaagatgaacaccatgtcgctgaagcaattcctcgaatccctcgcttgtccctaaccattactgacagaaatgggatggaaaacttactgtctgtgaagccagatcaaactttgggattcccatctctcaggtcaaaaagtttacatggacatcctaggaatgtgaaatccattcagggaaagttagacagatctggacatgccagtagtgtaagcagcttagtaattgtgtctggaatgacagcagaagaaaaaaaggttaagaaagagaaagcttccacagaaactgaatgctagtctgttttgtttctttaatttttttttttaacagtcagaaccactaatgggtgtcatcttggccatctaaacatcatcaatttctaaaaacattttccttaaaaaattttggaaattcagacttgatttacaatttaatgcactaaaagtagtattttgttagcatatgttagtaggcttagttttttcagttgcagtagtatcaaatgaaagtgatgatactgtaacgaagataaattggctaatcagtatacaagattatacaatctctttattactgagggccaccaaatagcctaggaagtgccctcgagcactgaagtcaccattaggtcacttaagaagtaagcaactagctgggcacagtggctcatgcctgtaatcctagcactttgggaggccaaggcagaaagatagcttgagtccaggagtttgagaccagcctgggcaacatagtgataccccatctcttaaaaaaaaaaaaaaaa

SEQ ID NO: 50 - DNA, 51020 bp, Homo sapiens
gcgcggcgaagctgcggccgcgacttggcgaggtggtccctaacgttgccgctcggcatccttagaaccggccgcccctgacgccgcgcggggaccccagtcgcccgcgcgccccatgcgctcactcttcggtgcccggccgggccggcgcctcgcagacgcggagccgcgcgggtgacggcacaggcggctgcgcgcccagcccagcccagcccagcccgaggagagggcgcgccgcgcccccgccccccgcccgctctcccgaggccgtgggtgcggatgcgcggctgacgactcgcagcaagagcaccgccgccggccccagcccgcagcatggcagccgccgcctatgtggaccacttcgccgccgagtgcctcgtgtccatgtcgagccgcgcggtcgtgcacgggccgcgggaggggccggagtcccggcccgagggcgcggccgtggccgccacccccacgctgccccgcgtcgaggagcgccgcgacggtaaggacagcgcctcgctcttcgtggtggcgcggatcctagcggacctcaaccagcaagcgccggcgcccgccccggcggagcgcagggagggcgccgcggcccggaaggcgaggaccccctgccgcctgccgccgcccgcccccgagcccacctcccccggcgccgaaggcgcggcggccgcgccccccagcccggcgtggagcgagccggagcccgaggcggggctggagcccgagcgggagccggggcccgcggggagcggcgagcccggcctcagacaaagggtccggcggggccgaagtcgcgccgacctcgagtccccgcagaggaagcacaagtgccactacgcgggctgcgagaaagtttacgggaaatcttcgcacctcaaggcgcacctgagaactcacacaggtcagtggggcggcgcgggcgcccggatcgcgcggacggggtcggcgcgagctgcccgaccacgcccccggagtccccgatggggcgcgaggtgggggccgggcgggccggaacgcccggggcctcgccccttcccctgccgctccgacccgcggctggccccgcgcgtcgcgcgaggcgggtcttggctctcggagccggcgcccgccaggcgaccgcgcccccgccgggcacgccccctccccgggcgcgctcgggtggggccgcgggggcggatatagtcatctgggctgggggcggggacccctcccggccgggaggcggcgcgggcaggtgcgggcggcctgggtgtggaccgcaggcggcactcgtgacggtggggcgcccggagcgggggcaggggacgctctccggggtccctcctcgtttcctcccccgctgcccgggcgcgcgctcaggaggggaggggccggccccggcgcgcggcgggcgaagttcacgcagggacaaggtttccttcgccactcggcacattcttcgctctcttcttcctgtaatttttccagcgctctaaggtttaatttgtcgtaaccaaagtcagcggcggcgcttggcgatgcggggggcggtcccgggtcccgctccccgcctgcggctctttgtgggagcccccgcccatccggcccggcgggggcgcgcccggccctaggctcctcggcctcgaggctctctccggaaaggaatgccctggccgctgcccatcctccgtgctgccctctcgcctgcccacctctcacctgccctgggccggtgcggggcgggcggcacctgcaccagggcgggcgctgagcctccagcctggggatcaccgcccgcccccgccagcccagcggcaacagttcccacgcgcggcccgatactttgtagttgattcatctgtggcggttccctcccccctttttgtttcgtttttaacataaagatgaaaatattttaatggacggcaatccttccccattttggtgtaaagaattgtatgcttcctctgagctcacgtgagttcttctgtgacactcacctcttctaccttgggggcaggctcaaaacccgtctactgaatactgttgtcttgtgaccaagggtggtggtctctcatttgtaaaatagttcacatagtgattaaaaggcataaaaagaagctgcagccttggataccctagagctgaaggccccttttttttaccatttggaactgaaagggcccaaggtctgcaggtgaggctttcagatctcggactaactttccccagggaggcttttgtggccgctccaaaccacgtggcaggtgatggggtagagggtgagagcggggccatttctaggcattcggggtcagttaagggtgtgggggctcaggttgggggtgggagtcagtgtgggctcagagttcagctcgggacgcggctgcagggtgggtgtggccctgggggaggggccaggctaggctcagctcggctccaggtggatcctgagtatcgggtgggggcagcgattggggcgtggctggggttgagatccgctttgggggatgatgcccgtgctgggcaggatacttaatgtttgggaaatttttctacggcctctgtcagggtggcctgccactcggcagcaccggtagcggggaattgaggaggggggtggccgaggggaggggctcgccgtcgtgggcggggccggcttgtcagggcctcagccttgggatgtcttcctggtgggttcatctcccgcttcaggctctggccccgcgcgagcctcttgactagaatattggcgcaggggctctggagacccgggcctcccgctgtaggtggggccagtttcctcggagcgcctggaaaccgaaggcaggcaaaagagcacgggaccaaccctttgagtgtctgcagtgtgctacagtgctcgttcttgaagcagagaaactattccacccttcaggtgtgcagacatcagaagtcctacctccagggtggaagccggcctccaagttggaagtgcacagggctccggcagcggggtggcggggagttgggaagaatgcagatttccgggcccctgatgccgacctagtacacacagttccagcgtgcagttgggagtgcatgttaccggtaccccaggtgacccattatgagagttgaactgcccagaaacctgcctctggagggagtctggttcagcatctggtggagggcacccctgggaagcccatttccagccccttcccaggtgtgcagagcataagtaactggtgttcctcaagggagaagaggagcttgctgttgggggagaaaagagcatcttgcagaagggagaaacccaggcaggcctcagggatgactgagaaggcagggcacaaggtgatggctttgctgcagccgtgggctctgaggtgtccgtggtttgtgggcctctagcagcattgtggggtctctgcagtcagtgactgaggtcatgccgggccccgtactccattaggctcgggaaggtgcccccgccccacttcccgcatttccaggatccacagtaatttcatggcagagggtgaatatcacaaccaggaaggtggccagctgctctgtgctgttcctctatgtgaccagggaccggttcccagatctccctgcaacttggtgatgtctgccctgaccacctgcaaagtcttcagggacatgaggtcaagtatgtgaagaccctttgagaagtgcaagggtcagccttgactctggaggcacttgtggtcccttggccgtggctctgctctgattttccacccccactctctgaacagctgcatgctaagagctttctgtcctggttagctgtgtagcagtgtggtttcccactcccactcttccaggagttatcctgtggacacattggtctctgtcacatttaggtaattgttgatattataacaatgcgtaataacacaaaaccaagaaaaacatctttgcagctcgtgctactttattatttggccaattagaacttccgagtccagacctggaaagtttgctaagaggggcttaggggagcagcaagaccaggagcagattttcttggaacctgaggtgctttgatgcaggaattcaaggactcaccttcgataggtcaggctggggccctcttgagggcagactggttgcccagatcctgcctctggagagtcctgcgtgttgtcctgaatggggagacttggcaggcccccagcagaatggccacttggtctttcttggcagagagaccctgaatacatttctacctatttgttcccacagagaattgttttcaaaactgctctgtgccctgttttccctccagcgctggagtcaaaacatctctctgcatgctgggccctttctgggttctgggggtcccatggaaaggtgggcacagtggcgtgcccagccttccctcctgcagaacccgaggcatgtttgtggtcacctggccctgtttggggtggaggagggaagtagagtaagatcacattctgtcagccatttcctgtgataatttgggtggggttcacctgaaatttatctttacccactgaagcaaggatttgatcctgacagattattgcgacccctcccccagggcacactctggctttagagacttgtttccaagcacaccgccccttgggctccctgcaggtcctccctgatgctgctgcctgggaaagcagagcagagggcatctggcagagcagagggcatctgggtgggatctcctttacccagggcaaagccaggcttgttggtggcctgtgctttgttcagagacacacacaggccagtggctcagcacgcccacccctccctctcgtaccctcgctgtcccaggctgccagtggccctagttgtgaaactcctcaaacaatgcagaaatgtatgcagcatgggaggtgccagcctgcaccaccaccaaaccactgttaccccgcgttggtgtttttctttacagaccttctagatggatttgcacatatgcatatgtgtgtgtccacgtagacattttgaaacatacttaaataggatcctagcaagtatctcactgctggcattttgttccatgtgtttgcttaaatgaggcatcttcattctttttcacagccgcatggtattccaagatgtggttatatggctgcattgtaacttatttacccttcacttatggaaaggacagctacattgccttttttttgttttttctgctattacaagttgtgtagtagtggactctggtgtgtgtgtgtcttggtgcagaggagctggcatttctgtaggattgagacctagtggtggtattgacagggttgataagtgttggttaaatgtgttgtggagttactgtgttatgtttttcaaggaaagagaccacacttgttagtccccgctctgagggagagacctattgtgtcacgactccaccttcttgaaaatgtttccttctcccaattctccttttgcatgtgtgagaacattgagaacgtttaaaacagtaccagcaaaaccactgtcactcccgcacgcctggtggctggctctcttggccatcttcagttctggttttacagagattggaaagtgtgtggtgggcgctcagccctggagcagtaggatgggggctggtgtggcgccatctccactccccccttccccctcgctgaaagaaggctggaagctgtgctgcctgagcaaactgataggacgcagttcattaaaccagtagcctgtgtctggggcttcacatgtctggaacacagcagagatgggggcctgatccttctgagtaggtgccctgaagcccaattctcaagcttctgacagcctcctgcccttagatcctgtgtgctcccactttacacatagctttaatctgattggttactggggaagggcaaaagacatggatggcagctaaaggcaggggaagaaacaaaccagcaggttgttaacatatgcatgtgtaagtgtgtgtgtttaaatgggtcatgaagaagccctacagtcaaccagcactggaacaagcatggggccatttgtggagaggcacatgtttctccgcagcaatccctgaggtctgcatgagagaccctggaataatgaacactctagcagggatcttgagataccatggcactgtgaagtgtgttcagtttgtgctttcaggaagcaattaaaatagttttaaaaataaaaacttctagaatagtacactcaactttcacaatcctaagacttccagactgtttgctctaggggccaggcatcattctgtttgtgttagtttacatcaagctatctaatcttcacaaggaccctatgaagtaggctctattattaatactaaatttcaaataaggaagctaaggctccagtgctttaggaatcatgcccaaggtcacacagtaagtgagggtggaacagggattggagctggggcttgagcctgggcagccgcccccgaggtgggtgtacctgctgtgtcctactgccactcctgtctggaccagtgtttcaggtcactgcaggtgagcagggccctgtggtagtagaaatctggatgtccccagcacacggcttcccgcacagatttttgctgcttcttaaaggttgagggagtagtatagtgaacactcctatactcttcccatagggtcattgggtaatattttgccacatttttctcctttcctccttctctttttctttctaaagaaagaaaaattaattttttgtctatatttttctcccttttccatctcgcctctctctttaaatattatatattatctgatacgcagtccatattcagttcccctagtgattcctaaaatgtccagtataggattcaggatccagttaatcacacattgcatttggttgtcctctctagtttcccttagtttaggatagtttcccatcttttggtcctttattatgttacgctggcatttgaaggcccaaagccagttgtcttgtagaacaactcacaatgtggattggtctgattgtttcccgtgatcaggtctggtttaaacaaattttggtccaaaatatggcacaggtgatactgggcacttccatcgcctcatgggggggggagggcatgggatattagcctgtcctactgcaggatcacatggttaaggtgggcggccaggctcagccccttctgtccacctggttggtttctactccatcttccagcttccttgactggagagatgttgggggttgggttcagctttggaaggcttttgaagtcaaaggaccacctggaggaggcctaggtgctcctttccccaaacagacaagacaccctgattttcttttgaatgaaaatggctccagatggtattaatagccagctcaagggtaactgtgagtgtgttcttggtcagcccacctgaatgccggccctgtggccacaggcagcctgtctcctagggctggggagggcctacggcgggtgacactctctaagtcctggtgagtctttatgtgctttcaagaaataaacaaaaattgtcctaagtccacacacctgaacctgtttttcttttctttctttcttttttttttttgagacgaagtcttgctcttgtcccccaggctggagtgcaatggcacaatctcggctcactgcaacctccgcctcccgggttcaagtgattctcctgcctcagcctcccaagtagctgggattacaggcgcctgccaccgtgcccagctaatttttgtatttttagtagagacggggtttcaccatgttggccaggctggtttcgaactcctgacctcaggtgatctgcccacctcggcctcccaaagtgctgggattacaggcatgagccaccacacccgaccttttctttcctttcaaagccccaaatgggattattttcttgagaagtcaacttcctgtcgagatgggaataaacttttctccagcttggcaattcagaagcagccactgtgctgtgtggctgaggttggggtcatggagacagccaccagtgcagtcctcggggtgggagatactgagttcagaaggctttggacactcttctgggccaaaataacagaaactcgaacttgttttactcttggcatcaatcgggcactgggcacagaagaaatcctcacccaaccaaaagctctgccatttggccataaacacgtatgcctccatagccacgtacatgtgtagaaacacatatgggtgtgtgtgtgagtggacgtggcaccctgctcatgcttgctgaatgggggagcatccacacctggaacatagtggctatgtggaacttctgatttctagttcagttttagatcttaggtccgtcttcatccccagcaaatgttaccagctgtttgtgaggcaggcttttgggggagacatgaagtttgttcagttgaaactagggctgtggtgaaggggctatgccttcacaccctgctgccctgcccagcagagtgaccggctcctgtgtcctccacactgcttcagttcccctcctgatgcagggccaggctgtgatcgccatttgctgttgggcattgtgtgtgtgtgtatgtgtgtgtgtgtgtgtgtgtgtgtgtgtgtgtgtgtgtgtatggtggcggggcagggggcggggggagggcacagcatggcaccgagcaccagaaacacagccttgaccagtccctggtttttaccaacatctttctggacaaacaagacagcacacttggcagggggagtattctgtttattgttctccatttttgaagttcatcacacaaaaacacttgctaaccagaaacttggctgcactccgtggccattggccagtctgtcccaaggtgacttgtttggggaagcactgaagcttgatgtctcagattaaatgtccttatgctggtgccacaggggtgtggcctactctgcatggatgggtgaccctgggtccccaggcacagggcacaggctcgtctccttgaagctggagcccacgctgcatcatgaaagagctctgcaagaattgaaggcccagagcaaaaatcgcttaccaaagagcatgtggctcagagcctaccttggcctcctgtctcaggagaaacttctaaaggtggagttgtgtcacgtgcttgtctcctgtgagcacaggccaggtgggaggaagcttgggagtggggagaggatgacgtgggctcagaggagccacgagcttctcccccgaccccagcgtacactggacacacatgggaggtgaggtgatgcctgagcagcctggcgagtggtcagggccctgggtggggcctcctcattcccttttggagcactggcagctaatgcttgggggggccaccatcctttcccggtctggcctcgttgggggacacatctgtcttcctcctggagtaaggagagcctgtgaacaaagcagtgaccccaagacctatggccactggggatggcaggagccttgtgcttccatatgtgggtccaagctgtggatggggaggccaagtgtcctggcatgtgggaggtggtcaggtgctccctggagatctaacaggtatgcatgggttagcgagacctgagagtccttcttgggccacacctaagtatgtgcagggcctgtgatacagccagaatttcctcctctgataaacttctctgagcctttctacttgtctttaacccttttattgtctaaatgctcactaaacaagaaaaataatacagggaacttggtttaggggtattggtagaagttaaagttgatggcagagcatgaataggggtgtctgcaaggaattgttggaaaagagattggaaatagagcgaaggcgtatgtgagtctcagaacctgactcctttgttgactgggagtggggcagagggcatgggtccagcaggtcattggtctcgggttaccaaaaaggttaaggctattcacctgggccactggctggggtgctgctcaaagccaggatctgggagccggggtcagcaccttgggtgcacctgggcatcatagcaacaacaaaccccaacacattttcagggaccagggcggataaatgggagttaatgacatggttcccacacatccgaatctgggatatgtaaatgtgacacacagtctgagcatttggcaggctctccatggtcttgctttgcatagtttggcctatctgctctccagacttactgccccgttgtcctcacctgcatgactgtccatgtctggtttgtttactcgtcattgaaggcatccacaggggtgccatctgcccccatgtccctctcccactaggcatgctaagtggcctgcggcagggcaggcagggactcagattccctccatcccatcgctgaggtcttacttccttcttccgcccgccttacacgtggaaggtttctcctgtgcttgtccaccagttgttgtttttgtcttctagcacggatggtgtggcagaaggaggccttggacagcagcacgttaggacccacaggggctctggccccttgcagctgtgtgttctgagggaagatgcccaaggttttattatcttttccagagcgccctttttttctgcttgcatggcaggccctttctaaaattacagtcataggttgcttaatgacgggtgcgttctgagaagtgtgttgttaggcagtttcgtccttatgtgaacatcatagaatgcacttactatgcacacctaaatggcatagcctactgcacacctaggctgtatggtgtagcctcttgcttctaggctgcaagccggtacagtatagtactgtcctgaatactgtaggcaactgtaacacaatggtaagcattttgtatctaaatatagaaaaaggtacaattaaaatggggtgtcgtcttatgggaccagcctctcgtcccacgtggactgtcattgtttgaaacgtcattatgtggtgcatgactgtactttgctgcttggcctaaggtgccagggcattctctgggtaagcctgaggggctttgcaggataccatcttttatcaaggttgaaattagttttagcactttattctgtgtcccctttgcggctgacagagcaggagcctgtcagtgtctactgtcacaggtgtagagctgctgtgttggcgagcaggtaggtggttttcctgaattactgtcaggctttagagtcttacaggaaatacagccttggctacttatagcttgtgatttgaagtttccctaatgatgggctgggtagtacacttcagcagtttgctttggacaaattgtatcattcttaagttcactcactttagcctttgagaaatttcaaagtttgtttccctgatcttcctagttgccctggattatgagccaagcgtttgaattcctttgcacatctagcactgcacatggccttggaagatggacatttatgtgagtgtgtgcacgtgtatgtgtatgtgtgtgtgtatatatgcccgtatttgcagcatgtgtgtatgtgcttgtatatgcgcatgcacacgtggtcagccatgcagccaagtctcagaacaatcgttccactggaagtaacccagtcttgaggcatctggccaggtggtgcgggctgcagcacaatgtttgtttctcccagccctatgaaccccagtggggctgcatcacttaaaggccggtctctacaagagcagggtaggaagcagcagtgcgtgcccagccgtggctgtgtaggcagaaccagccttcaggatggagggtgggaccctggagccaagccagagggtgtgtacccttggtccctgatgaggtactccatcttgggccattctgccccctggtctctctgctcctcctctgcaaaccaggggggccagcagcctgctgggatcctggccctggccgggttaatggatgggaactgagctccttggctgccaagctgaggttcagtctggccccattctcacttcctctactcccccttgtactgtgggatctgagcatttctttaacagccttcaggggtttccagcccttaggacaagcagcaggtgggtatacaggggagcagaccccaggggggcctgaggagggagggtgaaggcaccccttctttgtgctgtctgtagctgctcatcctgggagacactgtgggggaggctgtggcttccttcttccgccctctggggatgccctggcggcctgtcccttgggtgttgggaggaggtggcttggctgactgtccctgctcatggtcagggtcctcctacacagcagaactggaggtaaacactgggttgccttggcaactgggctgtgccatggctccaagtgctcctggctagagaagttcccattgtctcaagtttctaggatgggtttctattttgatttttttttttttaaattagcaagaatgactaagataccaaaatgtctgacctggtttctataatttcttaataaacatttgtcttccctttataggaggaatgttttagtgattcattgacttttcttttagacggtggcaaggccctggtgaggcagtgcgggggcagcacagaggaccccccactgccgacagctggcacgggaggctgggagagcactggccacgatccagggaccaggcatgcttacgtagacaccacacgaggattttattggctttgaggctaattaagttccatggaaaattttggggagatgcctctcccctgtggggggttcagatacccacaactggtgcttccagaagctgtctgaaggctgatgcgtctgactgagcccgaggagcgccctcccacccagtgctgcactctcccgccagaggcctggccccctccctgcaggtcagggcatgtgcttgtttataccttgttggtgtttgctgttaaattctaactgctcacctaggtagcctgggctggctgcgcccagtggatgtcctcccgccccccgcctgctgtctcgtgggagtgccccaggtggcactttgctgtgggagatgcagcagcgggctctcgtgcaggcctgacccttcaccttggatttcactgggcttccctgctctgcccacccatggattatcttgtaaagagtcacctgccccatggaggagccaggtgaggatccagggaagtggctttgtttattttactgtcagtagggctgacccaggttgccctggtgggtggtgtgtcctgtgagcctctctgcctctaggcctgtttccagggtctcgtcttcgttgtaggcctgcaggtctatttgggtcccttctcacgactgaggcaggctgaggatgtacccagttgggctgggctgccttgtgggtcctctctccactgccctcatggccaacctcaggcgtgaacctgcctacaaagcctctctgtgcagcagcagctgtggcagttgccaagggagctcagcaccaaaaaagatgttcagatttgctgcatttgttttggaatgagtgcctggtgttgcttgtgcacaccccaagcctcctggcctttccaggtttccctgttgaacaggcagctctcctgcggttgggtggcacagggctgtggtgagggccccagcatccctcctcacctgggtgctcagttcctttcttgtcatcctttctctgtttgtaaagcagaaacagtcctgctaacatcacccccttcaaagatgtatgcagaatttgattttttttcctggaaaatatacttttttagtgtttaagaaaaaactcgtgctgggcatggtagctcatgcctgtaatcccagcactttgggaggctgaggcaggagaattgcttgagcccagaagttcgagaccagcttgggcaacatagtgagactccactgggcatggtggtgcacacacctgtaccagctgctcaggagcctgcaggcaggaggatcacttgagcccaggaggtggcagctgcagtgagccacgatcttgccactacactcaaacctgggcgacacggggagatcctatcttaaaaacaaaagaaaaaaatctcaagtcaaaggtattgaaatagtattggaaagtgttaaaggagtccaaaacatgagcacacttgggagtttcacgggagacccagcgcccctgtgccctgtgttcatcctgacaatttgggctctggacctggagccccgagacattgctgtgtctctcttattggatcgcctcatggaagcttgactccacaaatgttgtatttgcatgaccttccttgggaggctctcagtgttttatttttcatcagagaaaggccttcttgtctgttggttctttgttatctaaacagaggcactgtggtgtagtgatgaggagccctggcctcagagtgggacaggctgagcccatctctgggttttcactgtgaagtgggtctggtcatgctgcctctaggagcagaggggtagaatgtgggtgaggcacccagtaggaggggtgtgtgtgcgtgtgtgttcacgtgtgtgtacgtgtgtgtgtcgggtaagtggtgattaacttgcaagagcaaaatttcaccccctgcagtattgttcatgggtacctaaatgaacagacaggtttgctgtcttctcttttgaaaagaaacagacacatagacaattcagaatctttttttttttttttgaggctgggacaattcagaactttttttttttttttttgaggctgggtctcagtctgtcacccaggctggagtgcagtggtgcgatcatggctcaccacagcctcaaactcctgggctcacactatcttcacagctcagcctgccaaagtgctgggactccaggtgtgagccaccacacccagcccagaactactgttttaaagcaggtgctgggtcactttccaggatcctcacagcctgacctgagccccccttcccagagtcaccctgtgacacagcatgtggggtgatgctcctggcatcccagccccaggcgcatccagcctcagcttctgcgtctgtatcctcctggataaacccagactggctgcagaaaagtggtacagcctgtgagcttctgtgagcatcctgttgttgctatggagaccctgttgctagacatcaggcatgctcagactagggagtggtgaccctgtctcaggtgagcctcacgtgttaccaggtaaccaacccctctcaggtaccaacaggctgtacctggctagactctttaattagcagaagtagatgaactgaaacctcaacctcaaggtgaaagactcagtcaccagtcatcagaacagttctggacaagtccacctctctgaggtgggcttgaaagttgccctgcaccctgtgtcagtagtcttgggcagtcttacagggacaggagagattgtgcctgcaggtggccatgctagtcctgccgagtgaccccaccccaaggaaaggactttcggagaccaggcattctctgggtgagactccccacactgggcagtcttgggtgaggatgccggctgccctcccagggacgcagtgccctgctgggtgccccgccttccctcctgagacccaggcaccatgacaggtttcttaactgacagctctttagtagagaacagaaatcctgtttgcagcaaaacttgcctcactggatcgcttcataacagctccttcaagtggggcgagctcatcgctgcggtcggcatctcagccatcagcagcccggagaatcccactcaggacttaggtttgctatttttgtgtctcgcctgggcttcgctcgtttccacaggcattccacttcttgtttacaggagtaattgccttcatgagctttgggccatctgcggatatatgtatttttttctttattttctttcttttttggggcagcagttctatgtttgcaaatatgaggattgtttcctaaagggaagcatgaggccttcttgaggctggcctcttggctgctgagctgggccttcgcacccctttcctgctttatttccgtcttcctgtgagtgtattttgttgtatagaggcgcttcctgtggtcggaggtgaacatttggagtgactaaggagagcatggccttcctcgctctcccggcgtctgattgctccgtggacacttgtgcctgttccccaggcagggcctgcttgctggagggggtcggggccactcctggccatggagtttccgcatccccctgctggccaggctcctgtgcttggggagaggaggacgccgaggcacatactgtctccgtgctctgctcttgtggtcatgagtggcctcttctctcttctgctttgagtgactgggtgtagagtggcgcctgagctggggactgtcttgcacccttgcacagggcccgccggctcaggtgtgcagcagacaccatcctgggagaaacagcagcaaggtctggggtggccacatttgcatgttctgcagaggcagttgccttcgggatttcagacttgcccccagccgtaaggcgggatgcagtgcccacagacaaggctgggtgcacacagcctcccaaacagcatcctgcagtcttaagtctgcacacctcccaccaggtgtcggcccccagcagtgggaaggagaccagccttcaggctgctcacctgaagggagaaggcaaggaggcatgaggggtgcatccagcctccagtggggacccacaggtggcctgggtgctgatgggccctggcagagtctgtgtgcccacccatgccgtcagtctcctgaaccgcaggagcaagaactggatttcatgttaggagatgatttccaacttcaagaaatgacctggaaaagttttctacttaaactgcctgttgttgttaagagctggccagctctggctttccaacagcacgcacagccctcgggccaggctgagtcctgatgtggggatgtgcccactgactgcgggtcaccatgactccatggggaaggtctccttggagaggtctgaggctctggtgcacgaattaacctgctccttagtcttccctgggagacctcttgatctcctgtccccacccatacttctggtcacttgtcagtctttgtataatgtgttcagtgtccctccctctgagacggcagcagagacaggagagccacgcattgcaagtggcccatgcctggttgctgccctaaatacttgctgtgcacaaatggcctggctgtcaggggtgactttggccctgggggatgttttccaaccccctgggacaaacacctgccaatacttagcagctacctcctgctagcgctgcgcacccacaccaccctgagcctgtcactccagctccagaggtggggctctccccacacccatacccatctctgtgcagatgcagacatcccagatccacccctccagcctgtgtcaggaggggagtgggcacctaggctttcccctctttgtggcaggactggaggagtgtcagcagagtggcctccttcacctgccttttaagccagggcgtgctctgaaaacacgccatggctggacgttttcatgtgtctggctggcaagggctccaggggaggtggcaggggtgccaggaatccccagccacccagacatttgccaagcttggctcctcagtgccttggctggtggcctttgggggtgacttcaccctactgtcatggctggcccatggcgaaagggttcacctgctgcttaggagctgagactgggctgggccaggccaggggccctgtttctcttctggactgtgggggtttgggccagtggggagggagagcttccccaagggaccattacagaatttgctgtaagaatgtggagaaggagttctggtccttgggtttacagatttttattctaaacctaatggaacctttcttttaacaaaatctcctggaatccagtgcagaaaagagctgggaggattgctgggtggggcaggatgagggtgggaggggttttgactttgtcctgaggctgtgcgggatcctccctgggtcccccaaggaagccgcctgagtggggagggaggggccgcaagtaaccaggagcaggccaaggttccagggttcagcccaggacagccagtctaggtgcaagccaaccctgggggctggccagggagtgtgagctgttgcagtttggggcaggtgccttccaggctctgtgggtcagggttctctcctggcccttctgagggtgccaccctggcctccccgcctttgagcaggtgggggttgggtctgggttccatagggctgggcaggaggaggcagctgtgagatcccaggcagagccaggagaggagcaggacagatggcatgcaggcgtgctgcatcgggctgggattgtggggtgccagcagacaggggtggagtggggacttgggcattcctcactcattgcctgagtgtcatgaggggcctggctttggctggtgtttctgtcccttgagggcgtggtgtctgagggcagggcctgtggctccaccctgtgtgctgctctgggggcctggaggcctgtgcccccgcctcagcctgcctttgccctgctgcaccgctggcctgcctctttcccattcgggcacctgcctggagagcactggggtgcgggcagatcctgccttgagtgagcaccgcgtgcctagcagcaagcagcaggggatctccaggagcgtggcagggtcccatcctgaaactgacaggaaatctgtgagtatgagggtgggacggagaaagcccgggaggtgtaccgttcctttggcccccatccccctcaccaggggaccctgccctactcactgtcttccagtggccctacatgggcagcatcctgcctggctgttgtggttgtgaggccgcagcctgagactgaccacaccagggcttagtgtgcttagttctgacccgggtgtctgccctgccagcctggtgtaaagtcgtcagatgctgtgggccacacgaggtcatatttgcaccgtcagtttaccgggggcaaatgaccttctggggagggctgcaactgctccccacctctcacccctggttgtctctgtttcccggagggttccgtttgtaggcactgatgggggttctggttctagaggaagagtatctgagctcagagggagtgcagctccacaagtgtgcccctctgtgccggcatctggctcaggcatgcgtgagcccctctgtacagatgcctgcctcacgctgagatgcccacggcccaggcatatctctcaggagcccccgagaaccctgacgggaacccagagctgttccgcacagaacaccaggtcaatgatcttgactctgtttctgggaagattacccatctgtggcttccagaaagcacctcttcgtttttctgaaactcacagccttctcccccgacctcctgtcctctgcttttctctgaggccagaaggagagatttccacaccggccctttgccctggccacaggcctgagctcctgcatagcagctgctgtccttccccttctggactagtccactctaacctgaccctttggtaaagagtatgatggaccccccaccgctgttaccagtattcagccaccctggagctgcggccacccacacagctgtggaaagcccccaggccacagccaggcaggagctcctccccgggttctcttcttcctctgcaggagcttccaggccagagccccaaggcctcatgctgccccctgccccagctttctcaggacatgaggcgtcccctccttgcaggccccccaggctgacttctgtgtcacacagcagccttcacttccgtatctttctttctcttttaaaggcatcaccttcaactggaagaagaaatgaaaataccacctgtgcctcgaaatctttcagtttctagcgagggacatcccaggcacttggtggtggggccagggctcctgccggccataggtgggctattggcctgcaggccaggttcctgcctgccaccactctgcacccctctgtgctggcggcatcagggagggtctggggagatgcagactggacgtgtgggttgggtgggccagcaggggagaggggcagcgtagggtcctgagtctgggggcaggagcagactgtggtagcaagcatgggtgaggacctcagttcccctacctgctggctctcatcggggctgggacaaggtcaggtctgtgacagggcacgacaccgagcccagcaggtaggaggatttgaggacctgtgaagctagaaggtcaagcagggaattcaggatttggacaccctcctgggatcagcaggcgttcccccctccattgctctgctggtagcaccagccttcccagaaaaaggcttctttggcagggcctgggaacctcctggagggagctgggtgaccagcttctctgctgagccccactgggacagcacacctcaggaagaggccgtccttggtgctcgtggtggggaaggggagctgtgaacaaggcttccccctgaggcagggctggggatgggcagtggagactggaggcagggaagagctacccaggctttgccgcacgtgggtggcaagcccgctagaacctgtgtgtgctagcgtcaaagggcaccctcagggggctgggctggggaggggccccaccttgactgtggtgatgagagaggcaggatgtggggcccaggaggtgactctgccttggaggtgctgctcatgagggacgagggcatcctatggcaggccctaagccagcggagcctcagagtaggggagagaggcggggcagtgtgacttgggaagccaaggcaagaaatggctaaaggaaaagtgggtgtcacagtggctgggcccaaaggctcccatcctgccatcctgtggcagcagcttgagggggccccaacctcttctgtctgcccttccaccccctccagcctctggggccctggggcagcatataggctgcaggggttgggggctgcctctgttgtagtggctgcagcgctggtggaacaggaaggtgtgttgttggcttctcctggaccacaccccctgaaggtgacaccctcctaacacgaggaagagagctgcgcttctcagtgcgttccagatctcaggcttcagtgtctccagcctggccttcttggccactccacatgagtctgcctcagtgtggaggcttcttcctgcactttcaggggggtttatttctgaaggcggaaggcaggcctcgaaccccaggtgttcttgctggtggaggaaagtggaaaacacgcaggctttgtgggaagaaaggacgccactcctcctcccgtggattgcctgtggagctgggacaggcagcttgccactcttgtcaggatgactgtggaaggtgatgtctagaagagagagcaggagcacaggcgcccctcttcagcttggttttgcactaaagggacagcagaacccagagggcctggctctgtcagcccagcctccagtgccttccgaaaggaaaaaccacgcgtggtacgtaggcacacacgcacgccgcaccacatgctttttattgaagtatacgtgtgctacagaccatttaagtacagaaaagctaaaagaagaaattaagtggcacccacagttttacctcccagacaggactgttgcttggcctggttctcactgaaaagctgccagcatagagcccaggaagcccctcctggcagccaagggtgtgaccctgcagtcacggcagcctgcctgctctggccactgatgtccgcattttttagaccctggggtcctgactgcatctcaggccgcagtgccttgggctccagtggggtgtctcggtgctggcattgtagagtttaagcaccgccccagagctgtggtggaggctcagtgtgctgctgtaacagaaatactggagatgggtggcaaataaacaacaagtttattttcatagttctggaggctggaagtccaagattaaggcgctggcagattattctgtatctggtgaggaccctcttcctggttcgtagacagctgtcttcttactataatgtcacatagtagagggagcaaagggattttctggggtctcctttctaagggtactaatcccataaggagggccctacagcctcatgacattatcaccttccagaggccccaattcctaagaccatccatcaagctgggagttagggcttcagggtatgggttttcaggaggcacaaacattcagcctatagtgcccagcgttcttgcctaaccacggaaggcagatggcgaggtagggtggggtactgtatcctctgcaggcctactcccccaactcatggcagcttttttgccccttaactttgtagggccgaagcctgtgactgtcattccatctgggggaatcccaggacccagggcaatgctgctgctgcccatttagggaggggaggctgacactgctttccccatgagccgccacctgtgcagattatgacatgtttccccagagtgtgggatggaccaatgcccgctgggccacatgggaggcgggtgccctgtcaggcagtagtggtacagcagcgctgtcttcgatggaacagccaccatgccgaggacctggggatctggagggcacttgcctcgttctgcactgacccttaacatgagtctctgggacccagtctgctccagctggtgccagcctgtggttagtcagcttgcctctgatacttcactgccctggctgcatgagtgcaagggcagtgctgtgttcttagtgcctagcatgcagtggggaggaattaggctggtgtctgcaggagaagtcctccgggcccatgtgaggcgagtatgggccaagcctgtgcccctgtgcctgtgacccaggctgggagcagggggcttcaggtcctcaggctgctttaagcctgtttctcctgggcctggagggcttcctggggagggggttcacagcttccaggtcccctcctgccactttgaacttgggtgtgaattaatgaaaagcagatgagctcagatgtccctggaattccacatgaagttgaatggtataaagtaaccagccatgtgttcttggcggaaccaaaagtactcagagtgttgctgaagctgccaagtcctcagagtagcctagcctttgccgaatttgtgcttcatgggatgaatcccatttcatgagatgatgtgcttttctccattgagtgaagccctagagaaaatggcccctaaccctcggccattccagacatggagagtagtacagcatgcggcccctgcttttaagccaatatgcccattacagggcaggaagcagccagggtctgccgcagttatggtaggatattgggcatcctggacccacggatcctggacagaaggatgaagctttgggattggggagggaggggatgagccgagcaggccccccagcgtgcagggcacctggatgccgaccacattggtccgttgttcggaacctcgccttagctctcttctgccagggcctaatgagaacaatggtctctcagctgagcaggtggacacctgtgaacttcatctcattacagatctcaaaggagggagtctatgtggttctgggcaaggatgctccactttgcttccgtcttcaccaaactcttaaaatatgaagtgtaggaaattatgcccctgcagggttcaggataaaggaaatgacacccaagccttggttctttgtacctgttccatccactgggtatttagagaaagtagcttggcgtgtaaggtggtctctggcccaacttcacccccttttttggtgaagtctgggacttgcacaagcactggctctttggctcagctttcagaccttgaaggatccgcaaggaagctttggtctgggtacagcccttgagaagggccttagaggtggccatgccagtggagaaggtgaggctaagcaggctcttgaggtgcgcccatggccaggccagaatgcaggcctggcactcttcgcccaggcgccttctgggcagcagcagttttgagtaagtaaggagcctaatgtttaatggcctttgtgtaagaacatgatgatgacagcgagagcagggaggctgggagggagtgtgtggatggacatccgagtaagagttccccagtgtctccaggaaccacttgctttgtaaaatgacccaaatccaccatccctggacctggcgcagattctgagttgggccaaggcctgggaaacctgagttggaaagtcttttctcagcccgtatcatggacttgcttttggtgctctgggctggggtcagatttgtaagtgtgttcctgttgtaagaagttgccttgccaaaagatcatcatttgagtgcctggcatttgtttttatttctatttgtgaaagtcaagcatgttaattaaggatgatttgagaaacaggaaagtatcaaggaaaattaatgaagaggaaaatcaataactttaatcccaccactcacaagtcaccactgttaaaacgtgggatcattccatacaagtcattttctgttctacattttcctgctttaacatcctgttaggctcataaccccaaggcactgactggtttctaacctggtctgagtggttgccccgtgtgcgcttgtcttgcactgagagctccagtgattggctgtcctgggacagccgtccacctcattattttcagggggagttcccaggagcctgcaaaggaatgtgcattttcagggcaggttgcttcttttcagaaaggaaggatgagtgtgctacccgcaagcaaggcatgagagcgcccaggtatgcaccctggcagggagagtgggcgggtggctgttggatgtctaaaagggttttgcacaccgggcgcggtggctcatgcctataatcccagcactttgggaggctgaggtgggcagatcttgaggtcaggagttcaagactactggcctggccaacatggtgaaacactgtctctactaaaaatacaaaaattagctgggtgtggtggcggacgcctgtaatcccagctactgaggaggctgaggcagagaattgcttgaacccaggaggtggaggttgcagtgagctgagatcacgccactgcactccagcctgagcaacagagtgagactccgtgtcaaaaaaaaaaaagggaggcggggggagttttgcagtgaacagaagtcactgtttaagtagagtttacacacaacaacaaaaaaagggttttgcagtgaacaaaagtcactgttggagtttacacaacagaggggtcgccacgctgccccgtacctgggagcttcagactgttccgaataggcctcccctggacactgagatcttggaggctttgtgatccagccttggatgccgggtcctgagatcttgcagtccagggaaaggtgagattgtctcacagcagaggcttgcctgctgcaggccacgctcaggggtttctacctccctcagtcccagtgtctgccctacaggctcccttggtcccgctcagaatgcacagacctgaccgtaccagtgagaaaggacaggctgtgtgagctctgcctggcccaggtgtgggctggccacgggctccatgcctgccttctccatgggccatgacgtcggccagcagcctcagcagctgctgagattagcgtctgtatgtggtgccacttggtgtgcctctggctcctggccctgtgctggccccgtggaagggcctgtcagcatgtactctctcctggggacaggagcagtatcttcagggctgggtctaccaacccggtctgtgcatttccagcctcctgtgtgcttcccagctctgaattatgaccactgggctgatttatttcttctgacatttgcaagctgttaggtggcagagatcagtgaataaaaacttaataaaaggctgtatttaatcccatgcatcctaggctgagccaagttcccttaggattgagcatcaccagatagaacccagagcccactggcattgggacctccagggtggctacttggagtttttgtggggagggcagtttcttgaccgtggagcatgacgaggctggacccacctccccgtctgtatgcagccaccatgcagcccacctaggctgtgggctctgttgatgccgccttggagtgtgcggcttgctctgggtgggccttccaggggaggagggactgcagaggtagtgacagggaagggaccctgggccagggggctgggctcaagggtggctccacatctgactttgtggcctcatttcctggtctgtcacttagggagttttgctggggcctgttaaagggggagtgcctggaggtatcaaagcaggggcttgtggccctggtcatccagtagttactgggggtgtttacagccgcctgtgctgggcctcccctggagaggaagtcacgcccacgttaagtgcgtgggaaacctgtcccaggcgttctgtaaccgtagctgcaggtgctctgggtgttgcctcctggctgtagagggcccccttgtgaagaggggagccccaggttggggggcctgggctggcaaagtccctgccatctggcctgcccacttggggctggctgtgttgggcctggtcccaccagggcttgggctgcttccagatctgttttcattttcaattccctttattgctataaaaccacttcggggctgcagagaacaagctgttgtcctcagctgacctcagattcctggcctcaattgtttgcctcttgctaattttagcttctgatcatttccactcttatcctccccccaaagggagacacagaccaagaatagctgctgggaaggggggctgtggtggctgtggccagagttccaacagtgagctggcagggctgtggagtggctcgctgtggccaagcctggggcagggggctctcggcaggcaacccccacacccttcccctctctcaccgaggactctatactgcaggcatgggcctcagaggagaagaggacttcactgttccttcttttaaacagaaaccaggctgcttctggggaaaaagtacacccccacagccctgcctagcttgaagacccctgagagtccctaactcccctgagcccttcagactccaggacccaggttgtagtgtggggtcagacgtggcacttgactacagccaggccctggatacagcgtcagtgtggaggcctcaggcctatccaatccctacccagcttggccccagagcctggcacagctctgccctcccagtgagtgtcaggctgcagttgactgacagcaatgtccagtccaggacatcagcccaggcctgcaggatgggactttgcctgcctggggcagggagagaagcagctgaccaaaccccaaaccgtggtgtgctggtgagcaggcctggggagagccagaggagggatgggctgaaatccagcgaggaggaatggcctccaggcagggcctagggttgcaatccttgtccatatattaatagttttgtaatttttgtttttgtttttgagacagagttacactcctgttgcccaggctggagtgcaatggcgcgatctcagctcactgcaacctctgcctcccgcgttcaagcaattctcctgcctcagcctctcaagtagctgggattacaggcacccaccaccacacccagctaattttttgtatttttagtagagatggggtttcaccgaaatgttggccgggctggtcttgaactcttgacttcaagtgatctgcccaccttggcctcccaaagtgctgggattacaggcgtgagccactgcacctggtcatattaatagtttttaaacttctgtttggagaacttcagacagatgcccacatcttcaggacacccacattttcagcacctgctagccccctgcagtcttatctctgcccctcccccaccaccgtcctctccagttgttttgaaggaaatcccagatgcaatatcaatttgtccataaatatttcagtgccttacatcttcaaatgaaagcctgatacgtctaattttcatactgggctaacagtaagtgtgaagcaaaaaatccaaagcctgaagtcaccccacatgacttggtattgggaattgtgtggatccagccctaaaacccccgggcttggggttggagccaccatttaaagaagtgttggagcccatctcgccatccctcagcctcgagttataactagtcataggtaaaaagaaggcaaccaggacacaggtgtttatgagatcaaaagcaacaacaaccgaaacaatcaacagtgctactaaggtaacacagataggtgaggaagaggccaggtgctcagtaagtgtctcctgtggacggtccctcacctcccctgagcagaagggcagggtgtcatctccacatgccttggggagatggcagggccagcactctccaatggcttctgaagaggagctactaggagaagaaagtgatgctctaaggaaaggctggactgccgagagcagtatacccatcccattttgtaaattatgttaaaaattgtgttagagtagtgcatgtggtaatacacatagcttaaggatcctgtctttctgtacgttcattgtgataagcaggtcacccccaccatctgccagcttcttcagctactgcctttggtatttacctttcccagctcgataacgtgctcataggggctcttcttgatggtagaagagtgttaggcattatctcctgacttcccatgatggcacatgagcgcctgcaggcacccttctcccacccatgtgataattggatatttaggatggagccagcatgcggtattttgggggatcatgacagtaaatgctagttgcaggtgacccatacattacacgtgtttctttcccttagactcaatagttgccatttctgcttggttttcccagtgctgttgtccccacacccccagccccccatttgtccccacacacccagtgtggcctgctccgtgtggcctggataacatctctgtgggggttggctgtcatcctgggacccctcccctaccatccaggccccacttcctggagcccctgccatctgcttcttggcagagctcctgctgcatagcctcctggaaggggtgcactggaggccatttttcctttccttctgacttttattttagggttgggggtacatgtgcaggtttgttacatgggtaaattgcatgtcacggggtttgatgttcttatttcatcacccaggtgataaacatagtacccgataggtagtttttcagtctttcaccctcctccctccccgctcaagtaggacctggtgtctgctgttccctcttttgtgtccctgtgtactcagtgtgtagctcccacttataagtgagaactggccgggcgcggtggctcacacctataatcccagcactttgggaggccaaggtgaatggatcacctgaggtcaggagtttcagaccagcctgaccaacatggtgaaaccctgtctctactaaaatacaaaattagctgggcgtggtggcgggcgcctgtaatcccagctactcaggagactgaggcaggagactcgcttgaacccgggagacagaggtttcaatgagccaagatcgcgccactgcactccagcctgggcgacagagcgagactccgtctcaaaaaataagtgagaacatgcagtgtttggttttctgttcctgcgttaattcacttaggagaatgggaggccattgttttaaggcttatatgtctggaaatgtcttgatcctggtctgaggttgattcacgtttctctgggttgaatcataggtgggaatggtttactcgtgcggtttggagctctgatgttgctgtggagaagactgaagcttttctgattctggctgtgtgcacctcccggtctctttgcctctcagggccttttgggcttgtgcctttaccagggcttggaggtgtgcacgtgtgtggaggtgcttggccaagctctgtcctctgcagcgggcccgtcgggtggcatctggaaaacattcttgccactttcttcacgatcacctcacctcctgtgttctcagggctgcctgcagttccttttatttggagctgttggtctgatccttacattttcatattttttccctcttacccatccatttgtatttttgctctgttttctgtgaaattctctcagtgttctctcccaaccctgctattgggatttttatttctgccacatttttccttctgtatctttactttcagactcaggtttctaagcctttgctttcaaactcaggtttctaagcttcccttttaaaggcacatgcggttcttgtttccgccaggccgtctatgcggtgaggatgttagtgacagctctggaagtcttctcgttgcgtggcctctgctccctccacatcacctgtctctgctccttggtctgggtctcttgcccacccacgtcaggctcttctgcattgtctgctgatccttgatgtctggtgacacggcccagagagcctcgagctgcgtgggggcttctgggtgcccatcaggctcagcgacggtggcctcctgtgggtggtctactgggccatctccttccgggttttcccccaagaggagtgttctgctcctgcctgggggagggagggtggtcctgctgcacactgggagagaagctgggaggcagcactctgtgagtgggctgttccccacacccctgttctggaggctgccctactctgagctgggtctggagtcgtcagtccagagctccctcctgtgtagaccctcccagaaagtcagcctctggttcctggcaggtgcaggaagggcaagcagccatctgtaaggtgaggaaagaccttgtgtccacagctgctttatctgatgttcaggtgccccccaccaactgcacccccacccccgccagagactcccgagcctttgtggggaaacgtggattgcttccttgccttctctgctgtctttctaatttcttgcttccagattatttttgttactctctttcccttttgctttgtctgttaaaatccactttctttcattgtagtgggatctggggctggaagggtggtgggtgcctgtgcctgacctgccagctttatccagagttcctgttaggcctttggtccagtgcaggaggcgtggggagagatgagggtaaggtaagcactaggtagggggcggctgagagttgtccagctgttgggcagccagcatctcctttgttcttgcccaacaatgttatccaggagtttgccagagatacatccagcaatatcctggaagcaactgaaggcagctcacaagaagacagttgtgcagtggaaggagggggtccaaacctaaggttggcaggttgactatagtacagttgcgattgtctgcattcttacagtttctgtcaaaacatcgttttcccaagtggctggtcagctcccctgtggttaacatgcttgcagcaatggatgagagctccagttgctccaccagcatttagtattgtcagtgttttggattttaaccattctcataaatatgtatagtgatatctcgttgtaatttgaattttcataataacaaatgacactgaacaccttttcacacagttgtttaccatctctctatcttctttggtaagagtgttcagatcttttgttcattttttaaattggcatttgcttattgttgagattgagttctttatgtattttagatacaaattgcctttacttttgatcagcctcaaatgaagagcatttttatcagctaaataaacctggctctgtaattgtggattccaacctcatattcctgtcttgccttgtgtttcagaaaatatctgaagaggtgcataggaatgtcacccctgggctatcaccagccatcagggctgtgttggtacgcaagcagtcacattgcctcccgatgcccagaacaaggatgttaaccgcacactggctcctgaagccagggaacattcccttcaagatggcagaggaaaggcgggggcagtggggtcagctggacatgcgtcaccctaccgtgctcagggaagatgcttctggcttcccctgggaggcagctagtgatgagggtctcacaatggaaaggaaatggaaatgtctgttctttgggttcagctctcatgagtccacaggtagcaccgttcatctggagaaggccttcacttgcacaatccatgatctggaagcttctgtggcaaggggccgatatacgtctccctacttatccattgaggagcaataagggttgtgactcgggtgtgcgtgaaggagagaagctccagagcccttgtctcaggtggcttctggccttctgttggcagaaaccattggtattctattatttctgtttttaaaagggaccttgagaacggaaattttcaagtgtgttttgtaacccttagcaaaaggagagcaaacacctttatgaaattctggcatgtggtccttttaacctttccaggcagtgtactggttcatgcaaactagtgctattcccttcttagggattggggtgctgggttctgtggaagcagtcccagtggtgagctggagcttgggtgaaaggtacgtgtgtgtacatacaccactttgttacatagtgttattgcattaattctgactgtccaaagtgattcatttgatgaaggcagaaatgcagaaaggacagtcacacacaaatcccatcttcctgaggtaacctctgtttccttcctgcaattagagctctggcatatgcatttcatgtgtgcatttgagggtggggctcagccacttggtagtctgttttcttccctgtccacgttcccaggggctgtttatcagcagctcacattggtggttcagaagaacattcgagagagacagctgggctggctccgtgtgcttactctccctcgtctaccccatccaacagattgtgaagcctggttccagtaaccttggggatgacaccaaggagcgctgagccctccaccccgcatgttgtggtcttgggggagggaggcaggtaggacacagaacagggttcctgccccagtggctcctcccagctcttgctagccctcccttggcatcaggcagacctaggtagcctcaggtcttggagtcccgtacagagctgttgcagagggggtcactccaaccttgaagcttctgggggcctggccgtgggatagtgcagagtgtggcactgcttttcttcccggctggtgtccctggggtcagctgccttaaggttagggccctgttctaggttaggacagggaagggcttaggaaacagggccagcaggatacagggaggaaggtgtgggcacggacatgcagcgggcaggcctgtgccgggaagagggtgggctttgtctcctgagaagaggtggccccccagagcactggtctccccacatggcaggcagtggggctctgtttcaggccctctccaacgcacttaggctgcgacaagcctgagcaggatgtagggggctactagacctgcgggcagggctgagggacagggcccggggctgccaggtcacctgttctctgcaagagggtttttgaacacaagggctttcccaaagggtaggggtaacttgctcctagtgggcaagaccgagagcccctggtggctccatgggcctgggctgctgcaggagaggtctgggggctttctagctcctccctgggggtctggaggttcctagcagaagccccggcactgttcacctgtttcagaaaaaacagaccgttgtctaatttgttgttgttgttgttttgtctcggctccctcaaaaaccaaaggcgttttttaggcccgtcgtccaaattacaagctcattttaattcggatgtatttactttgtgaaaccaaccctgaagaatacattgtttcgttatattctgctggaaaccttgccacatttttcctgagaaaactgagcctgctgtgcacctggagccggccaggtggcaggtgctgggcctggaagaggagcctgccgaggctcctccagggcttctgagtgccattgttttgagtgcgctgcctggtagcgctgggcccttccagggaactgcctggctccttcctcagctgcagcctcctgctgcaggggagctggggaccgtggaggtcccccacaggtcctcaggcccacatgcccccagcctgggcaagcctgccgtgaaataggcctcgtagagcctggctgtgggggcagcaggggcccctgggtgcagagggtagcctcgccgcactgtgggtgggtgcccctgcttgctcctcctggaacgtgaacgtgggcagcagtgttcctgttccatgctggggaggggctgtgagaatgtctttcttcccggtgtagcctagcctcaggcccacccttctgggtgtgttaccttggtgaggtcacttggtttctcacctctgacaagggtttcacatcaacactttcctgtcttccgggttggtagagtcagatgagcccagtgcaggccaaaagtaaaagctgcacccctgtaaagagtgtacatgcagctgtttgtgccattgagtgtctgtagcagagcttagcagggtggggtccctgcaggcaaggtcccccccaggagacacagaaggagagggcagggggaggaaatgaaggctgggggaggggagacacaggaagaggaagtgggccacgatggttgccaaaggctctgcagacaggggcccctccctcagttgcctagagagccggctgggagcacgggcacctggggtgcagagctggggctggctgtgcaggtgcttgttcgtgtcaagaagcagttggacttctctgtgagattctgcagatctcccctgtgactgtcaaggctggtgccccccaccccccaccccagacgtcacagccagaggcaggcccaagaggcctttccatactgtgtccctttccctacccaccacgtgctctgccctctttcttccctccctccctccttccttttctcttggtgcaagagaaaaccctttcccagtagtccacagattccctggttcctactcctcatgagcccctacagtggcacttgggatctgcatcctagtggctggatggacttggctctcctagctgccatccacctgggctaattttcagcccacagtggtgtcacaaagtggtcttatggcaggagtgtggtattcaggagcctgaagggggcttctgacgtggaattacaactctggaactgcttctgtttaaatcctttgctgaatatttgtcacccatagccttttaggtctgacccgttctaaactgctgggcctatcaaacaatttatcagggagggcccttctccaataggacagtttgcagcgtgacccaggggctctaaagccctggagccctgccctgggaacatctcctacaaagctagattggactttattgctatttttgagtttctcatcctggaagccactgcccagcacattctgaggagaatctgcctgggcgaccattgttattttaagagagctcttggggtaatatgaggaactgtgctttgaaatagggaatacagaatggggccagtaatgtgcccagagtgttgaatgtctgatttttaaattggcattattgatggctagcattttctagtttgctatggattttttgttttgaatttaactttttgaataggaaatgcatttgtgtgttttagaatctaaaagatttaagtagtttccccagggaaaattctgtcaaccttccctgttctccatctgctcagtgttcccctgggtgatctctgttcctactttcctagggaccctctctctgcacatacaggccaaggcgcacgtagatccttgctggtcatctctcctcaaccttgttttcctcactcagcttggagatctttccatatcagtttgtaaagaactcattctacttctttgcgatagtgttctgttatatgtgcgttccataatttatttgacaggccccagtggaaggacatgagttgttttcaggttcctgctgcattgactaatcaggagcatatcccgttttgtaggtgtgcaaatgcgtttgtaggctaggatgtcaaaagttcagatgtgggtaaaagggtgtgcacatttctaattttaataggtattgccaaatcgccctccatggaggttgtagcagtttgtactcccatcagcaaagaatgcctgcttacctgcagcctcaccaaggtgataagctaccaagctgcatttcagtgtgtctcatctgccattagctcctgatggatgaggtggagcatcttttcatgcatttgagagccatttgtagttccttttttatgaatgggctttgcccatttttctgttggatatttttctttttaaaattcctgtgagctctttctgtattggagattagccgtttgtgataggagctgcaaatattttttctctcagttttgtcagttatctcttgcctttgtttatggtgactttgttcatggagaagtatagtatactgttttgtgcagtcaaatagattgattgattgattgagactgagtctcactctgtcacccaggctggagttcagtggtgtgatctcagctcactgcaacctctgcctcccacgctcaagtgattctcctgtctcagcctcctgagtagctgggattacaggcgctcgccaccacgcccggctgattttgtatttttagtagagacggggtttcaccatgttggccaggttggtcttgaactcctgacctcaggtgatcctcctgcctcagcctcccaaagtgctgggattacaggcatgagccaccatgcccagcctttagtcttttcttttatggtttgtggactttgattcatagaaggaacttctgtcttacagttttctcctagaatgtttgtggttttatttttcacattagaatctttgacccatttagaatttatcctggtgtagggtgggaagtatgaacccagcctttccagatgctaccgaagtgtcctcataacatgtattgactgctccctgccctaggggttcgagatgtcactctgtcctttgcacagttaccactacctttcgttctaattctgccatttctgctgggcttcactggccagtgatcagcttacgaaactgtgttgaatcctggtggtctcgtttcccccacgtcattgttttgcaggatttttttctggctattactgtgtgtttttctgtatgaatttttaggatcaagttatcctattcgaaaacaaagcaaagcaacaagaaaaatgcctactttaaaaaatatcttcgcaagcattgtagaaatgtggagccacacatttgcccaaggaggattctctcactgaagcagtgttgcctccgacactgtggcagtctccagccaggcttcagcaccctgccagctcttgcatgtgaagagtggatagtagtgtgtgatcagcggcactagaccagagcgcctgggacagggcacacctgccccccatgtctctttcactactgggcggctcacaaacatgcttcccggggccccttggcccataggtgataacattgttatctcctccaagcaccactgtgcagcaggcatgtgccccacgtattctcccacttaaccctcacagtgactgagaaacaggctggatgacaatccctgaggcatcaacaaaggagtggaggtagagcaggctgcttccttgccccaggcaggttccagctgcggctctagctctggcgccagccagctgaatgacagctcactctctcctcctgggcctcacttcccttacctgctcagtgggtgggtaagagcttccaacctggacttcctgcgaagccatgtgcatgtcagctccatgtggcttaataaaccactaacatttctagagacgagcaggacagtcaaatggcctcctaaggagttaggaagtccaccccccaccacagaggccaggcctttctgctacccctgaggctgtatgcctgagtttcattggaggccagcagttgatcagcccctgtgtttggccatgctgacctgctccagaacaggagggtgaacagtcttcctggagtgaaaaacattgcagtcttgaggttgggagctagaagtggccccaaaccagtgcccacagggcagagctgtccatcagtgaatgacagcccactcactggtggggaatacctggagactggggacagtggcctgggagcctgagggcaagcaatttctctttggaagcctctccctgtgcctccctttgagtctgaccagcgctgcccctgccattgcctccagatacacacccacatggacccttgcgctccagaggtctgttgtatccaagacatccctgtgagggtgatggctcatttgcctttccaggacctcccggtaggagttgcatttcttcccttctcccttccatgaaggggagctcagcgaggcttcctagagaagacccagcaggaggccggcagaagaggcccttgcggcagacgctgctctggccccagcttggtaccgggcattggaaacattgcaaaaatgaccactcaacaggcttcccacaggaggttcgcagacagaaagatctgcagtgtggtttatacaggtgcagctggagccgggtggggtgggggggcccactcacctgtggggggttgggggggagtttggctaaggctggattgcaggagataacttggagcgtgccctttgcgcaggagggcagagcagagtggagtccatgccacagcccgagtctgagctcaggctttgagctggagcacgcacactcctgagctggctgcatttgcatgtggctgctgtgggggagaggggagggcctgggacttgggtgttgaggcggattgggggctcagctgaaggagagagagcccctgcgccccccttccggctggctctctgagagaacacgttgtccccgcctgggcctgcggcttgggcaagagcagcatgtgggacgctgtgttcctgataagatgaggcaattgctctcactcggggcgctgctccgctcgcggcctcgctgtggcgccagggaacatttatgtaacgcgcagccctgagcagctgccccgcccaaccatactccaatccccacccaccccactctccccgcaactgcatgcggtcccctaccctgcatcacccggccatgcagcctggtacccgaagagtcccccctctgcttggcacctgtaggacccccaaaccccagcatggcttagcccctctcccagctccccacagttcccccaaccctcctacagcctcccttcagggctccagggcacctagtgcccctccaggcttgaccccagcccccttcctctcaccaagtcttctcacaaggcctaaccccgccttgtcccacggcccccaccccatgcacaggcacaggcacacatagccagaacccctggggccctcccacctggggagctggagtgactctgagatccggcaggaaggctaggagctcctctgcaggagtctggaatctcctactggttctcttgtcattttggagctagagggagctcctgtcctggtgagtccctgtcttgctgttgctgtctgtgtaccccatgcccgggtggaggcagatgcagggtttgagcccagcaaggagggtgcttggatttgtttaggccattgggctccctttgccttagaatgggaggcgggctcactccctgaagggccgggcctggctggcccctcacctcactgtgtgcccccctgtgctcactgtactcggctgcacgcagccccgcctggagtctgtccccataacagcagtttttagagtgaagcttgaggacactcgcaggtgcctcagacccttcagaggggccatgagatcaaaactgttttcataacaatagcactgtttgcctcattctcccaaaagagtacagtaggctattgcagatgctacaggatgtgtgacagcaccacgacgactggaatgcgtgcttgggttgaagaccttttttccattttaatttgtaatttctaatacgatgaaagcagtggctcccgcccacatacaggaaagctcctggggctccctgcggatcatgtgggtgaaagtggcctggggcatgttgctccctgttcccgcctccacccgttctcccttctctgggctgctccttgtcagcctcctgggtgctgcctgagtgtcactaccaggggacccagccagacccagtgttgctccttgctagcctgagccataactcctgttgtgggccagttcattggccgtcacctctctgcagcaggctgagggaggagcagagaatggagccgtgggggccgcgtctgcctgggtcaggaccatgtctctgggccaggcacccagtatgtgccctgtcaaagcataaagctcctgatatatagggaggccaagagctgtgctggtggagtggctgcacccaacacccaccttcctccactccaggctgcctggcaccaacgtcccatccattggatgctgcatttctctgcggccccaacaccatgtggtccacctgtagctctgtgtacctcacatgcttccccagcctgcaggcagaagaagctaaaggacaaggctcctcacaagggctattaggaagcaaggctgagtctgaatttgggttggcttccccccacaccaacaggcccaaatcagaggagacccagttgacagggctaatgactaagagcaacaataacagctgagatttcaggagtggacctttggaacgtgccaggcgctgtgctgaggccggtcgtgcgcagccccatgggatcactgtatggaccccccgcatgaggacggggcagtgtgctcacttcctgtggctgctgtcacacattaccgcaaactgggtggctgaaaagcaaccgaaacttactctctcacagttccagaaatcaaggtgttggcagggttaattccttccagaggctctgagggagaatccactccatacctccccttccttcccctgccccctttctcccccttctcacttgctgccttccccgtctccctcactcccctcccctcttctccatgctccacacttgggagctcatctccagatcctgacctgattacatctgcaaagaccctttttccagataagatcacatgcacaggttctggagggttatcacttggctatatcttttgggggaccattatctgccctactgctggcagcacggagctttttcgaggccatagcgtcacaactcagggcaaacagggtctgaacctcatctgtcagacctgacatggttaatgctaaaccatttaatgctggactttcccaagcttttaatgactagtgtgcgttgtgaatctccaagagtggaattatcatgcaacattttcactctttagttgacaaaattttttttctggaaacgataaacagttttatacaatgataacatttctttgaacatgttttgggaaatattggactagatatttaaggaactatatttaaacacttcttcttcttgttatggaagaaacaaatacataggatttttttaaaaggcccaagccaggcgtgtggctcatacctgtaatcccagcactttgggaggctgaggaagacagatcacttgaggtcaggagttcaagaccagcctagccaacatggtgaaactctgtctctactaaaaatataaaaactagccgagcgtgggtaggcgcctgtaatcccagctagtcgagaggctgaggcagaagaatcacttgaacctgggaggtggaggctgcagtgacagagcaagactctatctcagattagatagatagatagatagatagataggtagatagatagatacccataacacagaggagcttgcaacaaaaaaaatcctctcaccagtccagccccactccctagacagcaacacttcttttctgattttagttgtcttgatggttactgccataaatgaactgtattttactgctgtttcttgatttatcaaatttagatattttctgttatcctcctgccatgaaatttaaggatttacctgactcctatccctcccctccaactcttcctaaattgatggatgtattattttacttattttgttgactatctttgtaattttaaatctctgtgtttcatttagatacgttctttgcacactgtgtgcattccaacttttcccttaaatccatgttctctgctgggcccacaggtcagttgtatggcctttgtttataggattggttctgaaacattgacaactagtgctaaggttagcatgaccacaactgtgtaaagtttgcttccatcagcagggcctgtgctgggattacatttcctgccaccacctcatggagttgttgtgaagaataaataatagagcataggaaaaacccctagaaccgagcttggctcggagctcttgacccataatcatgaggcattttcgtttacatctaatttgaaccacaatttttttgtatgtcttttatttttcctggagtttctaattgcctcttttttcttttaaacaaagaagagtggtgtgtctttactgggtcctgaagtttacccagccttttgatggtactctctggtgcacaaaactcactttcctcctggaattttcccccgtgagtcttggtcctgtgctccagtgacctcccggggtctctgcctcactcttgtcatgcaatggccctttactattcagtcatgtctctagctccttggttttatctcattttagctggagtgtgtgagacattaacttggaaggccctgttcctttgtcttcaggatccagtgtgacttaggaaaagtctgatgtctatcccagccttgttcctttgtggatgacctggtgtttgtttcttccccctctctctattaagctgtgagagctcctgtttttactcagtgttctgacattgcagagcttctcgcagcagaggtcttaactcatttacctggtccacctctgtgcagcctgtctcatgttagtttcctgtctcctttttcttttttttttttttttttttttactctttgacagagactgttctattatttcttttgtaatttcttctccatgttttctgttttctcacttgattgtaattgtcgtgtatttgggaaatcgtggtggctacttgattttgaatccccccaacaccctttcccccaacatgtaaaatcaataaagagagcaagtgtacccacacacggcccctgcttcagcagtaccaggagacggaacatcgtgacatccacatattttccagaactgttttttggttctttttttctcatatatttgctttgagtatatttccagcttttatatgaaagttttatatgcacacaatgctgttttcaattcctaaatgctgttgtttttgctttttttttttgagacagacccttgctctcttgcccaggctggagtgcagtgacacaatcttgactcactgcaacctccacctcccaggttcaagtgattctcctgcttcagcctgccgagtagctgggattgcaggtgcacaccaccacacctggctaatttttgtatttttagtagagacggggtttcaccatgttggccaggctggtctcaaacccctgatctcaagtgatccacccgcctcagcctcccaaagtgctgagattataggcatgagccaccgcgcctggccgtttttgctctctgaacttctttgtatggtatcctctttgcttttgcatcaaatttcatctcaaattcctcagagaatactaatcagaaatttcaagttaaaattttcttctctttcctggcttcactcttttcctctagagttggtggttgcattgcgcttggcctttcttttccatgctgctggttctccctggctgtctggccatccctgggtatctgcttgtgtttaaggtgggtgggtgagtgggtttcctctgttgaacatgggtagaccagcttcagtgactggcagtcactttagggtctgtatgggggtgagaggggatgagaccgtgtaggaagggcagccctgcggccacccctaatacaagaagggctcgtttctggggtgccagagccccccaccctggttcttcctgagcagttgatgtcatttttgtgattcagagttttgtgtgttgagtttgcctgggtaaatgctggcctgtctcccgctccgagtgagggatgggaaggagggagcagcatcctgaccgtagccaaccttcattacctcccaccccactgtgttctgcctcctccctaccggcacaggcccctataatggggtgctctgggttgctgcccttgtctgtcaccacacttgggtctgcaagaggctgtttcattctcctgctctgccagccgtccctggttggtcactttgggacttttgtgagagaaggagcagcagactggttgtagaattccaggccccggaactcacctacgctgaccctctcatgtgacagactagactgaggagggtcagaatgggaattgccttcctgccctgcaggggtgcagagtgtggctcccatggagcagcatgggcggctggactccgggaggcctgtgaagccagggcatgggcctgcaacccccaggcgttggagaccactggcccggcatgggtgtgtagtgcagcctgctttgtggtgtacttagggggtccactgccaggagcctggggccctgacctgtacctacccatgggccctgcagcttcagcacctgaaatgctgttttatcctaggccgtgtcctctgcctccatcccaggcgtgggcgggagggcaggggcccaccttcatctctgccttgatggatttgtcacagaagctcttggaggtggggcatgtgggaggggtgttgagagaccagggtgttgggtgttgcgggcccttccccagagagggtgtgaaggcggggccaggtgcggatactgatgctctgcccctgtgcccacaggtgagaggcccttcgcctgcagctggcaggactgcaacaagaagttcgcgcgctccgacgagctggcgcggcactaccgcacacacacgggcgagaagaagttcagctgccccatctgcgagaagcgcttcatgcgcagcgaccacctgaccaagcacgcgcgccgccacgccaacttccacccgggaatgctgcagcggcgcggcgggggctcgcggaccggctccctcagcgactacagccgctccgacgccagcagccccaccatcagcccggccagctcgccctgagcccgccacagccatgagcagccgctcccaccccctcgtgagtccctggcctttccttttgtaataagaaagaagagagagaacttgatgcaaagtccacgaaaaaacaatttttttcacctcaggtgtcaaagtaaatttgttaaaaaaacaaaaaaaacacaaaaatttcaaaaaacaccacccaccaaattgcacaatagatacacccacaaagttgagattcagcgttgttgaaccccctttctcagggatggacacgtttcacgaggtcagtgaggacaccccttcctgccgccttactctgtacatagatttgcactctggagttttctgttaggttcgggaacacgctggggacagagcaggccagccagtctggtggagctcagcgtctggctggctggccagcctgtgggtctgttgggagcagatgtgctcactgacgtttgtgcctccagggcagattcctaagcagctggcctgacctcttcctgcccagcccccaacccagtctctggcctctgcccaacgagcctggctgggcttgcaacgcagctgattctgagacaggcccctgcagagggatgccttaaagctgtccctggctggaggagcactccaccttggggatagtggagggggccttcagccctctgcaccctgcctgcctcacaccccgccttcaggagccctctcctacggcgctagggagcactggaagcagagatgccagccctggctgagcgtagcactgcaccgtccgacctccgaggcaggggccggggtcacacctgccaggactccgcttctccgtgtcccagcagaaggcatgcaggaccctgtcactactatacctgggcctctgatggggaattctggtcttctaaaaagatgttagaaattcctggtggcacatccagttccgagtttgcccgcacgggcacttttgttggaaacagtgggcaggtcatggggcctcctcatcagagggtctgtgtgagcggctgtgcatgtggcagcgcaccatgcttcacagagaccattctgtagcaagagaccggaacattgtgacttggaccttttcaggagtggcgcggatgttacaggaaatgctgtcggagagcgcgcattctatttcctccgcagggaatgccagatagaaagttgcgggcaacacttttctcagacccaccatgtccccaactcagacttagcaaacctccagcctctccgtttcccctggactcctcctcccttttcctcctgcttctccttgtcctgcctggaggctccaggccacacccagctggtggggctgctccagtgccccatcaccggccttctcctggcaggagaggaggagcagagagctgggtcctgggctgggattcgagccctgggcgggggtcagtcaagccgtggtccagcaaactcctctgcagatggctggagtgttgacccaggcttgtggcccaggtatcaccttcccttcctcctgagagttgaggcctgtaaatacaagggcccaggacagagtgtgtgcgtgcgtgtgggtgtgtgcgcgcgtgagcacacacgcgtgtgttggggggggtggggggattggggtggactcagggtatcttgccagagatacctgttttgatgagtacctattttgatgcaaaggaacggccctgggacctcagagggccacagatgggcttcctgggcctagcgtgccttggttgtggccatcctgcttctactcagccctgccatgctatggggtgcagcacaaacccaggacccaggcctagccactgcccacagctgatggtcactgttttggctggctccagagtggacaggtacgctctgtccacagcagctgctcaggcacagtatgccgtcaggtgcccgcttcttaccactgtgtgtcagctgggattggccgacagcgtggtggtgacttctaggtagaccgatggaccctaaattgggcagtggcattgtttctgctgtggtgggaactggcagggagagggtcacctccactctggttggatgcggagctggtccctctggctgccatgctgtgttggggctctctgacctccctgcttgcattgggtctgggagagagagtggaatatttggtagggaccttgacagaagagagccctgggtgcttgtggtgcaaagatcttcatgcccagttccaaagtgaggtccctcccaaagttgttttcgtgtgaggcagagaaagccacactctgaatacattttatgtctcaggaattcacattccaggttcaggaattttattccaaagtcctttggtgcactcaccgtccaccgttccccaaggcagggagagggagtggcccgtccctgggaggctggcaaagtgctctccagggaggggtcagacgtccttgtgatctgcccagggtgtcacggaaggagattttctagctccacatctgtctgcacataggaaggaaaagataggactctaaacctagtcatcttggaataaaaagaagagctggtttgttttagagcagggcggggggtgggggagggaagcgggtgttggctgtttccaaagagagcacttaatttaatttttcctttaaatgacccagggctgttccgtctgatagatggaagggtaacattgccttaaaacagaaatatgcaggcgttggctatttttggcataagagcgtgtcttcattcccaaagtggttctcgtttaatggcagggtgcggtccttaggccccggcctggactgggaaatgggggtagggcaccaggagagaaatcctcctgggtactcctggccagaccctcctgaatcatctgcggcttaaactcatctcgcttgaagggcagggagaaacccatgaatctcaggcacggttcacaggggtcctcaagggcaggtttccatttcatcatgaagtgagggactcctgtggaagagggtggtgggccttggaacgctgcctccactgaggcgggcacacaaggcggaccctcctgaaacagcctccattttcttcaaacatgcagaatgttttcccagactgcgtctatttcagggtcttccatttttgtggtttatggccatgcttgccagttttggtggggttgaggaacccataggactcatagaaataatagtgaaaactcaaacccttattttgggacttcagttctcgtggtccataggggcagagatgtcaaagtgaaggttgcctgagtgaagggagagttcccctataaaaggcctaaaattgatctggggctcagccatcaaggggctggtgttgctcctgtcccagacaaggaagcccctctttacatcagccatattaggggaacggttgtcagctccccaaatgcctactggatcctacagccatacaggaaaacagacggacacagccctttccttaaagagccctggggtcctgtcctgcaggatgctgcataggaatgggcagagatgtcctggatgggaacatggtcctggaggtgccctacctgcatcctgctgcacccccacccacgacactcgagtgcaagatcgcctcactcctaaccctgactttattcccaggccccacaccgaggcaggtgcaggattcgccatggtgcagcctccgggtacaaacatctgaggcactggcgatcccagtccttgcagcaccctgaacacagctcagaccagtgaggggtgattcagaggtggggatgggcagagagggctggccactctgcctcaggacttgacctcaagtgttctgtctccccacccggtgtgtccagaagaccagcctctttcttgccagaagcaggtgctaagatggactgcacagggtcccggcactccctcgggacccattcaggatctcagctgggcaggggtgccacccaacaggaagatgtgatctgagcaatagtgtggccttgtttctccgcttctggttgtggctgtgtgtacagggctacctattttgacttctgacaggtgtcactgattttctttcccccatttaaaaaaggtcatttagtcaaagacacagtgctagaggtttaaagggtgtaatgtgttggtcacatcacaaccagtaagaaacgcttggtaggttatccacatcttttgctgactgtttccatatacaattctggtcaccatattttccaaagctaaaatctgaggcgtgggctgatggtttttgaaatcaggattaccccaggaagaaccaggtcctattactaattttcctgattctgaggctctgaaggcttgtctgagacacattccggagacctttgtaccagaacttggatgcatagtccaccttactactgatacacgcctgagcaccctttagggcgaggcgccgcctcctgcctgctgtcctgtccctcagcatcagaagagttgaattcagcaggagacgggagcccggtgtccatgagggaagaggggtcgcgcttggtttctactgacccccatgaagatttcagacttgcagtgcggccacctggccctgccctgcctctctctttctcatacagctttaaaactttactacttttatttaaaaatgaactggatgggagagaagtagcgtcccctaccctacaagtcacacattccggggaggggggtggggggtggaggcaggaagtcatgggggtgggggtgggagcacgggaacagctttcttaaggcctcagggtcctgttttccctggcctcttctagagggcccgtggacaggtcgcagtgcgtgcttatttggaaaccaggtgtgtgagccgaatgcctgccaggccatgcactcagcagaggagcccttgtacctggctgccctgagaggagcaagaggccacctcccatgtggctctagacaccacgtgggctcattagccccagcgtctgtgccggctccaggtgcctgcctctgggtgtgtgagtgggagactttgctccctggcctcatcctagagaggcccctggtgcctagtgctgaggcctctggggctggaaagcctcagcagaaaggaggcactactgagcaactatgcattgtcattgtcgggtttggggctttcggtggttccttggtgactgggaattgcttgtgtgcatgtgttgggtgcatgcttccgggtctcagctgccccaggcccgcacaggcaaccccttcccatccaaagccattggtggagcttctctggaatcatttgccaaaagcccaaggcagaatccaagggtccaagaccatttccatggagctcatgtttttcttttctgtaggaacttttttttaaccagcacccaccataattccgaaggccacgtttcatctttcctggatcactacagtgaagtattacagttgtacagttcccagtctggccttggcttgctcggataaaactttgtatgtattttgtatggcatagattctatattgtaatgatgtcctatgcaaaaagaaaaattaacgaaattgtaaattttattgttttaacgtgtatgcatgtttagtgacgtttacattttgaaataaaatttatgattcattatttta

SEQ ID NO: 51 - DNA, 172214 bp, Homo sapiens
gttctctcgctcaggtctctgcatgtagttgtcacttgcagctccatttccatcacgtggtaaaatgccctttctcttctttcctgcagatggatggtttctagtgtgcttccaaaccccacctcggctgagtgttgggcagcacttctacatgatcctatgactcttgatatggacgcagtcctgtcagactttgttcggtccacgggggcagaacctggtctggccagagacctgctggaaggtaagcccacctccttgttccccacaccaccattctgggcataaccaccttccaaataagaagatttccaatacctgatgacagtggtacttgagcactaagtgggctttgctttgtgttacatcttaccgatattaagtcaaaattttatcactaattattatatttaagaaaatatgttcaatggagcagaaattataaaacattcaagaaaatacttttgtggtaggccttagtttcatatctctgtgttagcggagacgaaaatactctaggccagggtttttggtggaaaaagcacctactatccaggaaagccactgggagtaattcacaagcaagaagacagccttcatcctccagcttttcacgtagataccatttgctgcatgagaaattgcatcctccgtatgtatgatgttttcagatatgtattcagccataaccatagtgaactaaaatgaaagtgtagtttctatgtctctaaaatggatttacctttcttttttttttctgatggcggcagtggtatgtaaaggtgggagggaccagttacaacttctcaggacagtcagctgtgtgagaggagagaactttgtaatgtttactctttacttcaaatgtataaactgcaatttgtggagttagtaaatacttggtcaagaattgtaagtcacaatgattctttaagtcacttagggaaaataagaattattgtacatttgcagaagtggagagaactattcaatcatattgaaaattaagaaccacctactggaggattatcaaaaaatggcaatggcaaaagcatagtttttaaattttccccaacctattagaatttcaaaccaactccaagtttagaataaaatatgctgagagtttttgcaatctatggaaatcaaaatatgattctcccttcctgctatttatattatataatgtctccctgtcagtttccattattttcattaagtgggcagcagagtggagaagcaggcttggaataaggtcggcagtgaaatccgagtttgagttcagattcagccacttatcaactatgagatataggacaaattattttacttcccttaccctgagatttcttctatgttgagcttaacccaccttacaaggtgactgtgaatattagaagttgtgatataaaatgtgtggtaaagaagcagcatgtagcagatgctcaaaaaagtatagaagaccatgcttgtggtggccattattgtaattagtactaacatcagtattaatgtctagacagccttataggaagcaagagttgtcatctcttttctttattttttttacttatatttttcacattaagatacagaaaaattgagttttttgtgtctagttctatgaactttaacacatgtatggatttgtgttattactaccacattcaggacacagaagcacttcatcccctccagattctctgtcctgatgtcttttataatcagaccctcccctaccccaaccactggcagtcagtgctctgttttctatcactagttttgtctctttgcaagaatgtcagataaatgtcctacagagcctaatcttctgaaactggctccttttcatgcagggagatcattttgagactcatcaagtcatgtgtcagtagccggttcctttttgttgctgagtagtattccattctgcaggtactccagaatttctccactcatctgtccaggggcatttcagttgttttccatttttggcagttacaactagagcttctagaaacatttaagaacaggattttgtgaatatagttttaatttttctttgttttttcttttttttttttggtgacacagagtctcactctagcccaggctggagtgcagtggcgctatctcggctcattgcaacctccgcctcctgggtcccagttcaagcaattttcctgcctcagcctcctgagtagctgtgattacagccgcgcatcaccatgcccagctaatttttgtatttttagtagagacgggatttcaacatattggccaggctggtcttgagctcctgacctcgtgatctgcccgcctcagcctcccaaagggctgggattataggtgtgagccactgtgcctggcctagttttaatttttctaggctaaatacatgttaaccttgtaagaaactgccaacctgttttccagagttctgtaccactttgcattcctaccagcagtgcctgagagctccagctgccccacatccttgtcaacacttggtatttcttccttttttgttttttcattttaaccatttgatagctgtgtgatggtatttcttcatggttttaattttcattttcctaataattaatgacgttgaaaattttcatgctgtttattttccatctttttattctctttcgtgaaatgtctgttcaggctttttgcctatgtctaaattgagttgtttgattgagttttaagagttctttacatattctgaatataaatcttttgttcagatttgtgatttgtgaatatcttctcccaatctgtgcttgacttttcagtctcttaacagggccttttacagggcacagttttaaattctgatgcgttccaactgacttttttctgaggatcatgctttgagtgacatatctgagaaattttgcataactccaggtcatgaagattttcttgtagttggtcttttaaaagttttatactttcatgttttacatttagatctatgatccatttgagatgatttttgtataatatgtgagatttaggtccagattcagttttatgcatacggatatccaattgtttcaacatcatttatagaaaatatcctccttctttcattgaaattgaattgcctttgcaatttgacgaaaagccaactgagggtatttgtaaggaatatatttctggacagtggttctgttccattgatcattatgtctgttcttttatcaacattgtgccatattgatttctgtagctttgtaatgagtcttaaaatcagatagtgtgatttttctaaatttattcttctttttcaggagtgtttcagctattctttttttttttttttttgcctttctatgtgaactttaggatctgcttacctctatctactctaaactgttttgctgagattttgtctacaattttagtaaatctacaactcaatcctatgttatgtctttcagtccatgaaggagtgccataatttccatttgcttgggcctccattaagttctttcgtcaacattttatggtttttggcatgtagatcctatacatgttttgttctatgtgtattggggggcggggttgtaaactattgtacatggtattttttatttcagtttctacttgttcattggcaatatacagaaatataactgatttttgtgtgttgatcttgcatcctgcaatcttgctaaagctaaactcagtttgttctaggagggctgtgtgtgtgtgtgtgtgtgtgtgtgtgtgtgtgtgtgtgtgtgtgttccttgggattttctacataggtgatcatgttatctgtgagtaaggacagttttatttcttcctttccagtctctaggcctttctggttttcttgtcttatttcactgacgaagactattcaaaaggttaaatagtggtgttaaaaaagaagatccttgtgttgttcttaatctctgagaacaagcagtatttcaccattaagtagaatgttggctataggttttagtagatggtctttatcaggtgaagaaaatttctttctattccaagtttgctgagcgttttataataaatagatactgaatttttaaaatgaagatcaagtgggttttttgctttaaactgttgctatactagattaaactgattgccttctagtggtaaaccagactttcagctatttctttccatgtttctatgttctgccctttttttctttccttctgggactcagatgataggaagctcggcccttttgttattacctaaggtctctatggttctgttcaaggttttcaagctttgtctgttattcagattcagtcatttctattaatttatttatgaactgactgactacttcctccatcatcttcatcccagtagtgagcccagccagtgtgttttctatttttgtagttgatttttttcatttctaatatttccacttagttcttcttcatatcttccatttctttgcaaaattttctatatgttttaagagtaccctcctttacttgtacaatatttttaacaactgcttgaaaatctttgtcaaataattccagtatctgtttcatctcagagtagctgttggctttttgtatgctgagtatggtttcagtatgctgaattgtatcctagacattttaaatactatgttttgagattctggttattgttaaaatcttacagtgaacattattaactttattttagaagataatcaccccaaatgggttcagaccacaaattccaagttcctgcaagacttgtgtggattgtggttgctgtgagtctgtgagatgtggatctgtctggcacaagcgccacctagtggccagcctgggactctggtggtaatctatcccacatttcagcactcaaagtctgtgtggtccgtgtagggtcggatccatacatgtagagctcaagggtaagcccaagagttcatgagcaactttcaggggttgctctcccgaagcccttcctcattgtaacctgcccagtagtgtctgggtccctgggctctaccttttcagccctccagccagcttgggtggttgaggcttgatttaccctactctctggtgcacttgactgaaccacgtcagagctaagcagcgagaagccagagagaaaaagcatgaaggtttccccaccctctggggacctcagactctctggttggaaaggaagtttgcctggcctgatgactttaattatctgccatttctcactagggccacaaaatttcttgaggtctggggcacagagaagaaaaaattttagaagaaaaagaaaaaaaaaaaggataaattagagatttccagactttcttagaacggtagagacccctttcctgcttctgtacccgagttggctgggcttttcctggaattagtgcccactctgggttaggagctgcattgactccacactggggagactggaggaagggaagtgtctcgctcacctccaactctgtggcacttccaactgtggtctcctttctgcatcagcacctccaactgtgatccaccttcctgagcccggtcgctgctgcctgcacgctgtccaggggtcccggctgcacccagtgggacagagggtggcagtggtgagtgctcactcacctcacccactgctgggtcctgcctttggctttcacaggtaagaggactgtggttccattgtgtatgatggattatttaaggtgtcaaagttatttgggtgaagatttctctaaacccagtgtttcaaagaatgaaatatttttgttgtaagtcctcagaaagatgtgtattgggaggatgtcagtaatgtaggaatttagaggggagatgtctaaagggaaataaatcctcatggtggcaaaagctgagcggaaggtacatggtcctcatttgtaacttcttgtatttttatttatttcaaaaaaaaagttaaaaaaacactgcaatgatgggaatcacagtacagcagagggaggccaataagagaaaggaggagcagaggctgatcacaaccttggtaaactgaggcaagtgaacactgacctgcctccaaacagaagagggtggccttgcctgttcacctgcttcctgtgttaccagatcaaagttgggtctggctctctggcacagcaaagccaaaaactggcgtcaagactgcagtaagagaaagtgagacatttatttcagggcaggaagccaggagaattgggcagctcatgtttaagccctgaatcccccagtgccatataggtaagcgtttttacaggcaggaagaggctgggcgtggtggctcatgcctgtaatcctagcactttgggaggcctaggctggtggatcacctgaggtcaggagttcgagaccagcctggctaacatggtgaaaccctgtctctcctacaaatacaaaaattagctgggtgtggtggcatacacctgtaatcccagctactcagaaggctgaggcaggagaatcgcttaaacccaggaggcggaggttgtagtgagctgagatcgcaccattacactccagcctggagacagagcgagactccatcttgaaaacataataataataaaataaaggcagggggcagaagttacaggcaaagatataaatcaatacacggaggctgtacattggtttgacctaaaaagacaggacatcttgaaccagatgtggggtggagggcataggtcataggtagatttgaagattttctgatttacaatgggttaaggagacgaagctttgtctgcaaatttgtgatcaggagaaaagaacgttagctctggtctctgggcatgacttcctccaggcccctcaggaagaaatttagaacaaagagtggtggtccaagctcagtcctcagtttcccctgtctgaggtctgcatgccagcagatagcacttttcatttgttggtgtcctggtttctggaaatcagctcaaggacttgtgttaaaatgttatctttagtctctgtgggaactttgatctattctgtgacttaaacttccctggctattgttttaagttattcttcccttcttgcttcagttgctcatttacttcccagtgctggctaggtacctggaaatgcctttgaaggaactcaagatttccttttatttccatgcttgggggcaggtgcccggcaggcccctaagaggggtctctgctccatctcatcttcatatcagtcccttgcatgtccctgaagtggttctcccaaacaaattcaagtcaggtaactccatttcctccaatttttcatactccgtccccattacctgcaaaataaacttctccacctggtactccagcccttcagcatctagtcctattccgtccctcccctcattacctgaggcatctcttcaccatccctttccctgacttgacacccacctctgtgcttctgcctccgcccattgctcctgctgctcctccccctgcacacactgcctccctgttgaaattcagctctccctccacgatggatcatgaactccccgacagcaaggaccatacaaggttttgttcactgtttgcccaacacccagcacgtatgagtccctcagtagagtgatctattaatagctgctgaggtgcagtgatgagcagccagacagaaattgcccacatggagacagatggaaataagttatatagtgtgttagccattagtgctgtggagataactaagtcggggagaaggaagcaggtatgagtgtgtacagttttaaattagggttgtcaaggaaggcttcacttaaaaaaaataggatctgagcaaagatttgaggaagtgagaaagcaagccacgtggatgtctggaggaagaagtttctatgacgaggtaaggattcactgataattccttgccctcctgtggaactttgtggacttctgctgcagcttgtgtttggttgtgccttattttataattcatcacatgcttatcaagctggatttgcccagtcttgagcacatgccactgatttagcagaattcacggctctggcgttttcaagtgtgtgcgattagaggactgccatgggcaaatcccacacccttgaatgggaacaaaaaggtggtctagggaccatgaatcctaagcaggagttaacactcgaccacaaggtgtgatggcccttggccggggctgggaccatcagtgggtctagaaatactgaaaggaaaccgttggctgcccttccaagtgtcccgttcccactagagagagctctgccgttagaccagacgtatttggggaaaaaatgtcaaaaaaaataaaaataaacatctccagatcagaattctaagatactccctctcgcctggcctcattcaggaagacacattcttcctttagagagatgagtgtatttaaatactcttaaacagacccattaagaccatttgcagtgagtttccttgtgtcacgctgatcaattaagtagatcttatttccttcctattggggaagcttgtaacccccaggtaccatcactggcctattttgttggttttactcagaagtctgtgccattgtggctgcttaaaattaaacactttggccaggcttggtggctcacgcctgtaatcccagcacttcgggaggccaaggcgggcagatcacgaggtcaggagttcgaggccagcctgaccaacatggtgaaaccctgtctctactaaaaatacaaaaattagccaggcgtggtggtgcatacctgtaatcccagctactcaagaggctgaggcaggagaattgcttgaacccaggaggcagaggttgcagtgagccaagatcacaccattgtactccagcctgggcaacagagtgagactctgtctcaaaaaaaaaaaacaaaaaagaaagaaaaagaaagaaggaaagaaagggaaaggaaaggaagagagagagagaaagagagaaagaaagacacttcctctctggaaagccagccgtattcatcccagcgtctttcttggtgtctgtgcatggataaagcctccccattcccccgtgccccccaccactttgtgtcctttcactttgcttcacttatgtgcccaccactccagggctccctgaggtccaggaattccatgccattccctttcacatggctgagagccccagccctgtggatgagctgtcctgagtgggcactcagtaatgtgggcgtaagctgaagagggaaggagcaaaaaaacaaccagaagccctcagattcagagtcatgtcgttaaacactttttaagataaaaaattggctgtgcgaactgaaatcaatttaaactattttctttgattaggcaggaaagaggaggctgctgcatattaagaactcccacttaagccaaaccttcatgtttccaatctccaagcaggcgttgagggcctctgggctgagtgtgggagacccaggaagaaagaagagtaggccctgccttcaaggtccttcctgcctaaagcaatctataggcagctgtgttctaacaaaacttttatttataaaacaggcagccagccagcctatgggcagtagtttgccaacctgtgctgtagattaaaaaaggcttaagagatctgtcaaacagtgataatgtatgcacattatttgaatactgattccaacaaactaaaaaagaaaaattataagacaatctgggaaatgtgagcacttaacatttactggatatttgatattaaagaataactacttttagatatgatatttttattatgatagtgctaagaaaaataagatacatactgacgtggatggatgaagtaatatcatgcaggggttttctggggacaggcgaatgggtgggagaggagatgaaacaatattatccatgagttgattttgattaaacctggatagtagatgcaaacaggtttattataagtgatgtacgaatgtttccataataaaaagttttaaaacagacagcaccaggaaacttccacttccagccaagatgaagtatcagaatgtgggtgtgccctcctgcctgaaaaagaaaaagacaaatatgataaacaagacactgaacattagacagtaaaggacagtagtccccaagagattggaaacaaacaaggttagtcctgtaattgcccagctcactgccttgagaaagtttctaatccgtggtacagggagggggaacccagaggaagcttgcctgactccacagtggaaggagacagagcttagagtcccaggagtccaggaggctggagtccacaggtcagagcctgagagcggagacagctacacagagagaactgcagcgattcacagagggtttgcctctgccactcagccaagtgccgatcagtgcctgtgtgtgaggaagctgtgtgcagctggggagagaaccacctgagaggattagaggaaacagtgcctggggctgatacagagccatggaaagtgcctgtgctcaccagccaggctggacaagcactgaatataatacctagaaggatcttgcctcagtaattgggaataattagccctgtaatgaaaacttttctagggctagacacagtagctcatacctgtaatcccaacactttgggaggccaagccaggaggatcgcttgaggacaagagttcaagaccagcctgaacaacatagcaagacctctgtctctacaaaaatcttctaaaaattagctgggcatggtggcatatacctgtggtcctggctactcaggaggctgagttgaggagatcacttgagcccaagagttcgaggttatggtgagctatgatcacactgctgactccagcctaggcaacactaagaccctgactctaaaaaaataaaagtaaataaatcactctgatcatacctaatgaaccttaaaagcaagaagcaagatccacaaggatcacagtgaaatggcctcattgcctgatccaaagttcttgatctcacagccaaggaagtcaaggacacggccacaccaagggtgaggttagagcagaagcagaagtttattaggcaaaagaaagataacagctctctgcagcagagagggatccccaaaagcgttgccattcagcagtgaaatgcaagggtttttataagctagctagtggggaggtgaggtgttatcttacctacatagggtgtgaaaaaccccaggtgtgccatctgcgtagagcatgaatctctggcatcccccaccccacccttttattatacaggcaggtcttttgcctgagctactccacgttgctttcctactgtgtatgtgcttcaaagggggaggtggagcctccatggtggacacacctggccccaggtacccctttctgtctgtgcagctgcaagcatccccccgtgcaagctccagcttccttatctgtttgcagcccggtcttccaggctgctttctattagaagaggagtgatttcctgggctgctttttgttagaagggaagttctgccaaggactctctgccctaactatctgcctagctggtctctttttacctcctctctcaaaagtatttccaagaaatgtaacttcattctacaacaaagctcaataatatttatagaaatataaacttgtccagcaccaaataatgtaaaagtcttgctgtctggcactcaatcagaagttatcaggaatgcaaagtagcaggaacataggacccataatgaggagaaactgttcaatcaaagtcaaaccagaactgctagagatgttaaaattatcagacaagggcactaaaagttattataactgtactctatagaatagaataaggtacatactgacatgctgttcagatgtttaagtaaagttatggaagatactttttaaagcctgagttgaacttccagagatgaagactacatctgagatgaaaaagtaactcagtggaattaacagcacattgcttaatacaaaaaaaagagaaaggttagtgaacatgaagacatagcaatggaaaatatccaaaatgaaacacagaaaaaaatagaagtaaagaaatattaaaggcatcagtgaaagccaggtgcagtggtgcatgcccgcaatcccagctacttgggaggttgaagcagaattattgcttgagcccaggagtttgaggctagcctgggctacataatgagaccctcatctctaaaaaagaaaaaataattaaaaattaaagcatctgtgagctgtggaaaaatgtaagcagcctaaaataagtgtaattggaatccttgaaggagaggcatgaacaataggaaaaaatgattcaaggaaacagtacctataagaaaatgtataagttaaacacctctattagaaaagaagcagggcctcaaatcagttaccttaatttttatcttgaaaactagaaaaaaaaagagcaaattaaacccagacagaagaaatgaaataataaagaccagaacaaaaaacagtgaaatagtaaatggaaaaatagtagagaaagtcagtgaaaccaaaagtgggttctttgagatcaataaaattgataaacccatagccacataatcagaggaaaaagaagatacaaattaacaatatcaagaatgaaagagatgacctcagtacagattctcaagatattaaaaggattataaaggaatattataaacaattctatgccaataaatgcagcaagttaaatgaaattcacaaattatttgaaaggtacaaaataccaaagcctatgcaagaaaaaaaaaaaatgatttgaataggtctatatttattaaagaaatctaagttgtagttgaaaactttctcacaaagataactgcaagcatctatagcttcattggtaaattctaccacacatataaagaaaaaattataccagctcttccaggaaattgaaaaggggttatacttcccaactcattcattctttgcgccagcattaccctaatacaaaaccaagaaagactacagacaaatattcctcatgaagaaaagtgtgaaaacactgaaaaagattttagcaaatcgaatttggcagcatataaaaaggatactacctcatgaccaagtgggttttatcccaagaatgcaaaactagtttaacattcaaaaatcagtcaacataattttccatattaacatactgagaaacagaaggtatacaatcatctcagtaaatgcagaaagagcttttggtaaaatccacattcgtccttgatttttagaaaacactcagaaaactaggaatagaagaaaacttcctcaatcttatataaagtatttacaaaaaagcctacagctaacctgacacctagtgatgaaagaaagcttttccccaaagatcaagagggagataagaatgcgccctttcactacttctatccaacattttcctggacattctggccagtgcagtcaaacaataaattataattaaaaagcacccagattggaaaagaagaagcaaactatctttattcacaggtgacatgatgacatatgtagaatatctaatggaatttaaaagcattttttggaactagtaagtgaagttagcagtgttgtaagatacaaaaccaatatagagaaatcaattgcatttttacaattgcaatgaataattgcattattttttaaaataaattttaaaaatactttattcagtagcatccaaaaatataaaatatgaataaatttacaactgaaacttcaaaacattgcttaaagagatgaaaaacctaaataaagggttaaatgtaccatatccatgggtcaaaagactcaatattgttgagatgttggttctccctagattgctttaaattcagtataatctcaataacaatccaagccagctttttatgtagaaattaacaagttgactttaaaattcatacataaatcccaggacagagaataaacaaaacaaactttgaaaaattggaataaagttagaaagcatatttgttctcacattgctatgaagaaatacccaagactgggtaatttataaaggaaagaggcttagttgactcacagttccacattactggggaggcctcaggaaacttacagtcatggtggaagacaaaggagaagcaggcaccttcttcacagggcagcaggatggagtgagtgcaagcaggggagaggccagacacttataaaaccttcacatctcgtgagactcactcattattcacaagaacaggatgggggaaactgcccccatgatccaatgacctccacccactcatgcccttgacacgtggggattatggggatttcaattcaaagtgagatttgggtggggacatagagccaaactatatcagaagtctgacaatacctgatattaaaactcataagagtacagtaatcaaaactgtgatgttgatcaaatgttcaacatgaagactatcattaataatattgcatagtgtactagaaaatttgctttcaaggcacacacacatacacacacacatacacacacatatgcacaaaggggtaaccgtgaaatgatgaataagctaatgtgcttgactataataaccatttcactatgtataagtgtatcagaacatcatatcatataccttaatatatacaataaagtagtttttttaatgtagagaattagatcaatgaaacaaattggaaagttaagaaatagttcacatatgtggacaactggtcttcaataagcatacaaaagtaattcagtgcaaaaaataatcttttcaacaaattgtgggataattggattttcatatgcaaaagaaatgaactttggtttacatctcactcatatgcaaaaattaccttaaaatggatggtatccctaaatataaaacctaaagctaaaaaagtcttctagaaaaaaacacaggagaaaatctttttattttatttttattatttttttttatttccgtaggttattggggtacaggtggtgtttggttacatgagtaagttctttagtggggatttgtgagattttggtgcacccatcacccgagcagtatacactgaaccctatttgtagtcttttatccctgagtcctcaaagtccattgtgtcattcttctgcctttgcatcctcatagcttagctgccacttataagtcagaacatacgatgtttggttttccattcctgagttacttcacttagaataatagtctccagtctcatccaggtcgctcaaatgccattaattcatgagaaaatctttttaaccttgtcttaggaaaagattttctagacatgataccccatgaacaatccataaaagaaaaattaataaattggacttcattaaaaacttaaactgctttttgaggatagtgttaagagaatgaaaagataaactgcaagttggaagaaaatactgcaaatcatatatctggtaaagtacttgtttctagaatatgtaaagagttctcatgactcaattatttttgtaaaaactatccaattaaaaataagcaaaagctttgaacagacttcaccaaagaagatacatggatagcaaataagcaggtgaaaagatgctcaacatcattaatccttagggaaatgtaacttaaagccagaatgagatagcactacacacctatgagaatgactaaaaccaacaatactgagcataccaaatctcagcaaggatgtggaaaaactggtaaatttgtacgctgctggttttgaatggaaagtggtgcagccactttagaaaacaattcagcaagttcttcaaaattagacatgtacctagtgtacaatccagcaaattttactcctatttatttacttaagaaaaccgaaagcctttgcccatagcaaagcttgtacacagatgtttttggcattcttagtgagggctaaaaaactggaagcaacctaaatacccatcacaggtaaacgggtaaacaaatggtggtagatacatacactggaatgctactcggctctcaatccaaaggagtgaattattgataacgtgcaacaacagagatgactctcaaaataattacatgaagtgaaagaagtgagacaaaaaaaaactacatattgtgcaattccacttatgtaaagtctaggaaatgcatagtgatctatagcgatggaatgcaggtcagtgattgcctcagacagggctgagggcagcagtgagcagtggggattacaaagcagctgaggaatcttttttttttttagacagaggctggagtgcggtggcgcgagctcgtctcactgcaagctctgcctcccgggttcacgccattctcctgcctcagcctcccgagtagctgcgactacaggcacccgccaccatggctggctaattttttgtatttttagtagagatggggtttcaccgtgttagccgggatggtctcgatctcctgacctcatgatttgcctacctcggcctcccaaagcgctgggattataggcgtgagcgaccgcacctggcctgaggaatcttttgagagtggtatatatgtatggtatcttgcagtgataacagacctcagaggtattgcagattcagttccagaccactgcaataaatatagcaataaagcaagtcacatgaattttttggttttctagtgcatatagaaattatgttggctaagcacagtggctcacacctgtagtcccagcactttgagagccaaggaggacggatagcttgagcccagagttccagaccagcttgggcagcatggtgagacctcgtctctattgaaaaaaaaaaaaacaaaaacctacaaaaatcagcctggtttggtggtgcatgcctgtcgtcccagctactggggaggctgaggtgggaggattgcttgagtcgaggagacagaggttgcagtgagtggaaatcacgccactctactccagtctgggtgacagagcaagaccctgtctcaaaaaaaaaaaaaaaaaaagttatctttatactattctgtagtctactaagtgttcaatagcattatatctaaaaaatgtacataacttaatttgaaaaaatactttattgccaaaaatgctaacaatcatctgagccttcagtgagtcataatctttttgctggtggagggtcttgcctcaatgtttatggctgctaactgatcagggtggtgattgctgaaggttggggtggctgtgacaatttcttaaaataagacaatcgtgaagtttgatgcatttaattgactcttcctctcatgaaagatttctctgtagcatgtgtgatgctatttgatagcattttacccacagtggaacttctttcaaaattgaagtcagtcctctgaaaccttgctgctgctttatcaaatgcattttgtaatttctaaatcctttttgtcatttcagcagtgttcacagcatctttaccaggagcagattccatctcaagaaaccactttccttgctcatccataagaagcaactccccaacttgagattgtagcaatttagtcacatcttcagactccacttctaattccagttctcttccaccacatctgcagttaattcttccactgaagtcttggaccccacaaagtcatccatgagagttggaatccatttcttacaaactcctgttaatgttgataatttgaccacctcccatgaatcacagatgttcttattgacttctagagttgtgaatcctttccagaaggttttcaatgtactttgcccagatctatcagaggaatcactatctatggcagttatagccttataaaatgtatttcttaagtaataagagttgcaagtcaaaattgctccttgatccgtggagtacagaatggatgttgtattagcagacgtgaaaacattgatcttgtacatcttcatcagagctcttgggtaactaggtgcattgtcaaatgagcagtaatattttgaaagaaatctttctttctgagcagcatgtctcagcaatgagcttaaaatattcagtaaaccaaggtatcaacagatgtgctgtgcccaggcttctttgttcctatagagcacaggaagagtagatttagtgtcattcttaagggcactagaactttcagaatgataaatgagcattggtttcaacttaaagtcaccagctacaattgtccctgtctgtagaagctttgaagccaggcagagacttattctcatctagcctagataacatcttcttccaatagagggctgtgttgtctacattgaacatctgttgtatagtgtagccaccttaatcagcgatgttagctagatcttctaagatctagagatcttgctgcagcttctccatcagcacttgccacttccccagtgcaataacatgaaacttttatgttattgaagatggcttttttccttaaacctcatgaaccagcctctgctagcttctaacttttcttctgtagcttcctcacctctcttagcctccgtagaattgaagagagttagggtcttgctctggattaggctttggcttaagggaatattgtaactggtttgatctatccagaccacagaccactgaaactttctccgtatcggcaataagactgtttcactttcttatcatttgtgtattcactggagtagcactactaatttctttcaataattattcctttgcattcaaaagttagttaactgtttagtgtaagaggcctagcttttggcccatcttagcttttaaaatgccttcctcactaagcttaaccattcctagcttttgatttaaagtgaaacatgaaattcttttttttttccatttgaacaacttgacattttagggttgttaatagcctaactttaatatgttgtgtctcagggaatagggaggcctgaggagagggagacaggagaatcactggtcagtggagcagtcagaacacacacaacgtttattaagttcatcggtatgtgtgggtgtggttcgtggtgccccagaaccagaactgttgtaattacaacagtaacatcaaagatcactgagcacagatcactataacagatataatcctaatggaaaagtttgaaatactgtgagaattcccaaaatgtgacacagagatgcacagtgagtgcatgctgtttgaaaaatgatgccaataaacttgctcagcacagggttgccacaaacctttaatttgtaaaaagaaaatgcagtatcttcaaagggcaatacagtaaagcacagtaaaatgaggtgtgtctgtatggacacgtgtcagcttctcaaattataaacttaaatatgtgcattttatttggtgtcaattgtataaagcgattaaatttttaaaaggactgatgcagacagcacctggcgtctgggataaggtgtatcattttcctctttatggcaggaactgccacgccccctgttttcatgctgccggagaccagctggcaagtggggggcagtggctctccttgccaatcctgggcatgcaggtgacagtgcagggagagtgcccttcccacatggcccccgtttgtagccacagctgtccctacaaaaactgggcagcctgaagtgaattaacaagacagttttcagatcttcacttgcttgtgggtttcacatgtcacatttaacctccagttacatcgactttttcaaaccccacttaggcatcttagaattttatcatttgcattcttttatgttgaataagagagttgtagtacatgccccactgtctgctttctaaaacatccaggttggagttagcgccttcatacaccctccctggaagcaccaggtgccatcctcagtgcagcggcaaggcagtgtcggggctctctgcccccaggtctctccccgcctggttccattggctgctgggaaggatgcttggatgggaggtctttgtgttttcaggcaggaaatattatttgctccgctagccctaggtcttactaatttactgtgcaatcttcaacaagtttcttgatcttcttgctctgttttctcatctgtaaaattgagggcagtgagcaaggtgacctgtaggtcccaggagcaccaaggtagtgccgtatttagtaccaggttttcctaagaggaaatgggggctacttggggtcaaaacaaaggagagtctttctagatagggaaggactagcagtgggtcaaaacttgccaagaaggactatgaatggagctttgcttggggtttaaaagcttcagtcacagacttggaggggctcaaaccccttgctttagaaggcagaaaccaagaaccactaaggacctaggacttgctgatggtgtctttggagtttaaggtggaactgaagttagagctgatttccttcctgtcacatccagtaagactgggaatggttgggtgccagaggcaggttccagaaggtgggaagagtcctgtctgcgtccccagggtcccaaccttgaggaaagcttgctgtccttctgtcctgcttcacactccctttggttaaaggtttcagtcagagcccgatagaaaccttcaggaaaaaagggccccagactgaggcgaggacactggggaagccttgggcggtttctgtgtggggcagcccctgctctgtgaagcacaggggaacgggactccatcgctgtcatcggcactcatgccctggtgcagacctgcaggaacattgcctgctgtatacagggcagatgggcactgtgccgggagaagcctgtaggaagggaggccttgagggataaggagggaactccggccatgagcatgcacagagctccgtgaaggaaggccttgacagacagaggcatggtgggtggagacgggtggagaacatcccggcagaacacagagcacgtgctgtggcttgctggcagggacatgtatgctgtgtaaaggcagggagtaggtccaggtgccctgggaagagtgtgtgtagagaaacgtcgtggaagaggagacacccaacgcgaggtcatggctggtttgcttgctgtgtttaaactgccatagactggcttttgtcagcagtggcagagagagggggttgcatttttctctttttagtttgcttttgaggtctccctctctctgtagagtggctgtgaagtccagccctgccctgacggggctccaggggaggtggttgtgcatgtttatgatgtgccttcacggggtacttctttatcctggtggatggcagaatccctgtgtctgacctgtgcccaggtctctcctgggagacttgtttaccctcttagacacccttgagtctcttgtctgtgtctggtgtatttatttatttagcctaccaagatagccactctttaggacagttctgaatttggaaagaagttaggttcaggtgtgtcggtcgagtgagacacagaggaggccactcaacaaaacctatgaaataccagaagcagtgagttcctcgcaggtccggagagaagagggcagcacgctggactaggggagccgtcaggacctgtgtgctcgctagcgggtggggagcaagatagatggagtgtgggctctgagggctgaagcctttatggggtccaggccatcaccccagcaggttccccacaaggagttgtaattcgttgggttagagcaggtaggcacaagttacaggaggccatgctgtgagtgaagggtggtcatggcagcatatctgagcagtccatgctgggtgtgagggtctgcagggtgggtcaagtaggttgcatctagctgtcccttagggacttggtcaccaggaggcagctatataaggcacatctctggatcgaccattttgagggcctgggaagaggtggagacctggaaactttcaaggatgactaagccctgcttctggtatgagaaagtccaacatacattcaaaataggtaccaagaaagcataacattataagaattcactgcagaggatcatctgaaaggtctaaggtgagaaatgaatatctagtgtagaagttggagaggcatccataggaatgatctctaatgaactggatctccctccaagatagagatcaaaattggtttaaaacaaatacaggggggtggagccaagatggccaaatacgaacagctctggtctacagcttccagcgtgagcaacacagaagacgggtgatttctgcatttccatctgaggtaccaggctcatctcactagggagtgccacacagtgggtgcaggacagtgggtgcagcgcactgtgcgtgggccgaagcagggcaaggcattgcctcactcgggaagctcaaggggtcagggaattccctttcctagtcaaagaaaggggtgacagacggcacctggaaaatcggttcactccaacctgaatactgtgcttttccaacgggcttaaaaaacggcacaccaggagattatatcccgcatctggctcggagggtcctacgcccacggagtctccctgattgctagcacagcagtctgagatcaaactgcaaggtggcagtgaggctgggggaggggcgcctgccattgcccaggcttgattaggcaaacaaagcagccgggaagctcgaactgggtggagcccaccacagctcaaggaggcctgcctgcctctgtaggctccacctctgggggcagggcacagacaaacaaaaagacagcagtaacctctgcaaacttaaatgtccctgtctgacagctttgaagagagtagtggttctcccagcacacagctggagatctgagaacgggcagactgcctcctcaagtgggtccttgacccccgagcagcctaactgggaggcacccccaagtgggggcagactgacacctcacacggccaggtactcctctgagacaaaacttccagaggaaagatcaggcagcagcatctgtggttcaccaagatctgctgttctacagccaccgctgttctacaggcaccgctgttctgcagccaccgctgctgatactgaggcaaacagagtctggagtggacctctagcaaactccaacagacctgcagctgagggtcctgtctgttagaaggaaaactaacaaacagaaaggacatccacaccaaaaacccttctgtacgtcaccatcatcaaagaccaaaagtagataaagccacaaagatggggaaaaaacagagcagaaaaactggaaacactaaaaagcagagcacctctcctcctccaaaggaacgcaccttctcaccagcaacggaacaaagctggacggagaatgactttgacgagctgagagaagaaggcttcagacgatcaaactactctgagatacaggaggaaattcaaaccaatggcaaagaagttaaaaactttgaaaaaaaactagatgaatggataactagaataatcaacgcagagaagtccttaaaggagctgatggagctgaaagccaaggctcaagaattacgtgaagaatgcagaagcctcaggagccgatgcaatcaactggaagaaagggtatcagtgatggaagatgaaatgaatgaaatgaagcgagaagggaagattagagaaaaaagaataaaaagaaatgaacaaagcctccaagaaatatgggactatgtgaaaagaccaaatttacgtctgattggtgtacctgaaagtgatggggagaatggaaccaagttggaaaacactctgcaggatattttccaggagaacttccccaatctagcaaggcaggcaaacattcagattcaggaaatacagagaacgccacaaagatactcctcgagaagagcagctccaagacacataattatcagattcaccaaagttgaaatgcaggaaaaaatgttaagcgcagacagagagaaaggtcgggtaacccacaaagggaaacccatcagactaacagctgatctcacggcagaaactctacaagccagaagagagttggggccaatattcaacattcttaaagaaaagaattttcaacccagaatttcatatccagccaaactaagcttcataagtgaaggagaaataaaatactttacagacaagcaaatgctgagagattttgtcaccaccaggtctgccctaaaagagctcttaaaggaagaacttaacatggaaaggaacaactggtaccagccactgcaaaaacatgccaaaatgtaaagaccatcaaggctaggaagaaaactgcatcaactaacgatcaaaataaccagctaacatcataatgacaggaccaaatacacacataacaatattaactttaaatgtcagtgggctaaatgctccaattaaaagacacagactggcaaattggataaagagtcaagacccatcagtgtgctgtattcaggaaacccatctcatgtgcagagacacacataggctcaaaataaagggatggaggaagatctaccaagcaaatggaaaacaaaaaaaggcaggggttgcaatcctagtctctgataaaacagactttaaaccagcaaagatcaaaagagacaaagaaggccattacataatggtaaagggatcaattcaacaagaagagctaactatcctaaatatatatgcacccaatacaggagcaccaagattcataaagcaagtcctgagtgacctacaaagagacttagactcccacacattaataatgggagactttaacaccccactgtcaatgttagacagatcaacgacacagaaagttaacaaggatacccaggaaatgaactcagctctgcagcaggcagacctaatagacatctacagaactctccaccccaaatcaacagaatatacatttttttcagcaccacacctattccaaaattgaccacatagttggaagtaaagcactcctcagcaaatgtaaaagaacagaaattataacaaactgtctctcagaccacagtgcaatcaaactagaactcaggactaagaaactcactgaaaaccactcaactacatggaaactgaacaacctgctcctgaatgactactgggtacatcacgaaatgaaggcagaaataaagatgttctttgaaaccaacgagaacaaagacacaacataccagaatctctgggacacattcaaagcggtgtgtggagggaaatttatagcactaaatgcccacaagagaaagcaggaaagatccaaaatcgacaccctaacgtcacagttaaaagaactagaaaagcaagagcaaacacattcaaaagctagcagaaggcaagaaataactaaaatcagagcagaactgaaggaaatagagacacaaaaaacccttcaaaaaattaatgaatccaggagctggttttttgaaaggatcaacaaaattgatagactgctagcaagactaataaagaagaaagagagaagaatcaaatagacacaataaaaaatgataaaggggatatcaccactgatcccacagaaatacaaactaccatcagagaatactacaaacacttctacacaaataaactagaaaatctagaagaaatggataaattcctggacacatacaccctcccaagactaaaccaggaagaagttgaatctctgaatagaccaataacgagctctgaaattttagcaataatcaatagcttaccaaccaaaaacgtccaggaccagatggattcacagccgaattctaccagaggtaaaaggaggagctggtaccattccttctgaaactattccaatcaatagaaaaagagggaatcctccctaactcattttatgaggccagcatcatcctgataccaaagcctggcagagacacacacaaaaaagagaattttagctgaatatccttgatgaacattgatgcaaaaatcctcaataaaatactggcagaccgaatccagcagcacctcaaaaagcttatccaccatgatcaagtgggcttcatccctgggatgcaaggctggttaaatgtacacaaatcaatagatgtaatccagcatataaacagaaccaatgacaaaaaccacatgattatctcaatggatgcagaaaaggcctttgacaaaattcaacaacccttgatgctaaaaactctcaataaattaggtattgattggacatatctcaaaatattaagagctatctatgacaaacccacagccaatatcatactgaatgggcaaaaactggaagcattccctttgaaaactggcataagacagggatgccctctctcaccactccgattcaacatagtgttggaagttctggccagggcaattaggcaggagaaggaaataaagggtattcaattaggaaaagaggaagtcaaattgtccctgtttgcagatgacatgattgtatatctagaaaaccccattgtctcagcccaaaatctccttaagctgataagcaacttcaacaaagtctcaggatacaaaatcaatgtgtaaaaatcacaagcattcttatgcaccaataacagacaaacagagagccaaatcatgagtgaactcccattcacaattgcttcaaagagaataaatacttaggaatccaacttacaagggatgtgaaggacctcttcaaggagaactacaaaccactgctcaatgaaattaaagaggatacaaacaaatggaagaacattccatgctcatgggtaggaagaatcaatatcgtgaaaatggccatactgcccaaggtaatttatagattcaatgccatccccatcaagctaccaatgactttcttcacagaattggaaaaaactactttaaagttgatatggaaccaaaaaagagcccgcattgccaagtcaatcctaagccaaaagaacaaagctggaggcatcaccctacctgacttcaaactatactacaaggctacagtaaccaaaacagcatggtactggtaccaaaacagagatatagatcaatggaacagaagagagccctcagaaataatgccacatatctacaaccatctgatcttcgacaaacctgacagaaacaagcaatggggaaaggattccctatttaataaatggtgctgggaaaactggctggccatatgtagaaagctgaaactggatcccttctttacaccctttacaaaaattaattcaagatagactaaagacttaaacattagacctaaaaccataaaaaccctagaagaaaacctaggcaataccattcaggacataggcacgggcaaggacttcatgtctaaaacaccaaaagcaatggcaacaaaagccaacattgacaaatgggatctaattaagctaaagagcttctgcacagcaaaagaaactaccatcagagtgaacaggcagcctacaaaatgggagaaaatttttgcaacctactcatctgacaaagggctagtatccagaatctacaatgaactcaaacaaatttaaaagaaaaaaaacaaacaaccccatcaacaagtgggtgaaggatatgaacagacacttctcaaaagaagacatttatgcagccaaaaaacacatgaaaaaatgctcatcatcactgaccatcagagaaatgcaaatcgaaaccacaatgagataccatctcacaccacttagaatggcgatcattaaaaagtcaggaaacaacaggtgctggagaggatgtggaaaagtaggaacacttttacactgttggtgggagtgtaaactagttcaaccattgtggaagtcagtgtggcgattcctcagggatctagaactagaaatatcatttgacccagccatcccattactgggtacatacccaaaggattataaatcatgctgctataaagacacatgcacacgtatgtttattgcagcactattcacaatagcaaagacttggaaccaacccaaatgtccaacaaccatagactggattaagaaaatgtggtacatatacaccatggaatactatgcagccataaaaaatggtgagttcatgtcctttgtagggacatggatgaaactggaaaccatcattctcagcaaactatctcaaggacaaaaaaccaaacactgcatgttctcactcataggtgggaattgaacaatgagaacacatggacacaggaaggggaacatcacactccggggactgttgtggggtggggggaggggggagggatagcattaggagatatacctaatgctaaatgacgagttaatgggtgcagcacaccagcatggcacatgcatacatgtgtaacaaacctgcacattgtgcacatgtaccctaaaacttaaaagtataataataataataaaagaagttgccatagccaccctaaccttcagcaactaccagcctgatcaatcagatgccatcaacgtggaggagagaccccccattagcaagattacaacttgctgagggctcagatgattgttagcacttttttttttaacaataaagtaatctttaaggtgtaaaaaagaaaccataaaaacaaaaaaacaaaacaaaaaaaaaacaaatataggccgggtgcagtggctcacacctgtaattccagcactttgggaggccaaggcaggagaatcacttgaggcgaggagttggagcccagcctgggcaatatagtacaaccctgtctttactaaaaatacaaaaattaaccaggtatggtggcacacacctgtagtcctggcaactgaggaggctgaggcaggagaatcatttgaacccaggaggtcaaggctgcagtgagctatgattgcaccactgcaatccaacttgggcaacacagtgagaccctgcctcaaaaaaaattatattctgattttctgagtccatgaacacattgtccaaatggatttttctagctcctccaagttacagatagttccatgcacacacagaacccaccactctcaaatattttccccactagtatactattaaatttttcaaacatgcaaaagatgaaagaattgctcaatgaacaccatgtacccaccacctagattctacaattaacattttaccctactttctttgtcacatatatgtacctatccatctacccattcttccatgaatccatcaattcatctaattttttgtatatttcaaggtaagttgtagatacgtagcttacatttcaccttaaatgtttccgcctggctattattaactggagtgcaatatgtttttggttctttatggtaaaatctatgtgcaatgaaatgcacaagccttaggtatgccattaataggtattgacgaatagacacaccttgtgtctgaaactgtaataaaaaaatcaaacactaccttcctttcaaaaagtttcctcacttcttttcttggtcaaaacccctccccacctcagcccacccctcagcaaccattgttctcaatttttttttgcattcctagattgattttgcttgttccataacctcgtataaatgaaagtgtacagtgtgcaaggtttgtgtctggtttttccaccaagcacatttctgaaattcatctatgttgagtatattagcagttcatttcttttgaagaaagaatgaagtgtgctaagtagtgtttcattgtgtggctataccacagtttgtttttttatccatcactatttaatgggtatctgggtggtttctggctttggctactatcagtaaagctactacagacatttctgtagaagtctttttatggagatgtggctttgcttttcttgggtaaacacctatgagtgaactctctggatcccaggtagatgtagctaggtcataggcagatgtatgttgagtattacagaaactgctagaccttttcaattgtgttcatattgttttatactcccactgtaacaacatacgagagtcctgcttgctccatcatctttgatgtttagtgttgtcagtctttttaactttagccattctggtgcatttgtatgtcattccattgcagttctttttttttttttttaaatcaggaatgtttagtcgaagtctgatattgtggtgtactagtcatctattgccgcatacaaaaatcatcccaaaatttagcagcctaagataaccatcatatatttcttacaccatttctgaggctcataaatccaagcgtggtgtaactggctcagggtccttctcgaggctacagtctagctggggctgcaggaccttcttccatccccactcgcagggctgctggtggcctcaattcttcactggcggtcagcaggagacctcagagcctcaccacagcctcttccctggctgcctgggcaaccttgtaaagcatcagttgacttccctcagagtgagtgatgagggagagataaagcgacagcttatggtggaagccacagtgtgtcatggagtaatctcggaagtgacatcccatcacataggctataatccatcggtcatacagactaaccctagtacaaagtggagggggccacacagagggatccttgggggctatcttggagggtggccaccccgtggggagaaggtggaagcagccacctcagggaggcagattgtaatcaggacccataggagcagcatggagcccatgtgtttctgtgcagtttgctgaagccagtcagaacatcctgagtctgacttatcacccttctctggcctgctggggttcctgaaccaagtagtttaacttgccaagccttagtttctgcagttataaaatggtggtatgaatgaatgaaacaaggtatccgcaacactgaaatggaacataatagggcctgaacagaggacagttatgaatatttccatacaaaatgcaattttatgcccttcatcaatggtcattttctctcattttacttttgaggactagatttgccaaagtccctctggggccaacccagtacaccactgagaagccctttgaaaaagccagctttatcatcgttttgtttttatttcttgatatttggaaagttttcttccttctgtttctatgtgtcctctgcctaactagtcatggtgactccttggatagtattctccatggtttcttgtgaaatattaatgcttaccttgcaatcttgcagcttttagcatgaattattttgctgattataatcaggcctctaggataagtaccactgattttaatttaatgttaaatttgtactgagtgaatcataatggtcagactaatctaaatggtgcaggtatataaaactacatgcccatgtgctcagttcctgcttgttgatgttttgttataaagtaacagctttttaacatcaaatgtattccaagtagccactttacagtgacactgcaaaacctactacaaagcaaagccaataagacaaagtcaaaatatttcaaagtttcttattgaagtattgcatacctctagaaattacaacataactgtacaacttaatgaattctcagaaaatgtagcatcagtgcaaatatcattgaaatcaaatcggtggggcagttccaagttggccgaataggaacagctccagtctacagctcccagcgtgagcgatgcagaagacaggtgatttctgcatttccaactgaggtaccgggttcatctcactggggcttgtcagacagtgggtgcaggacagtgggtgcagcgcaccgagcatgagccgaagcatggtgaggcatcacctcacccgggaagtgcaaggggtcagggaattccctttcctagacaagcaaagctgtcacagatggcacctggaaaatcaggtcactcccaccctaatactgcgcttttccaatggtcttagcaaatggaacaccaggagattatatcccacgcctggctcggagggtcccacgcccacggagcctcgctcattgctagcacagcagtctgagatcaaactgcaaggcggcagtgaggctgggggaggggcgcccgccattgctcaggcttgagtaggtaaacaaagcggccaggaagctcaaactgggtggagcccactgcagctcaacgaggcctgcctgcctctgtagactccacctctggggacagggcatagctgaacaaaaggcagcacaaacctctgcagacttaaatgtcccagtctgacagctttgaagagagtagtggttctcccagcacggagtttgagatctgagaacagacagactgctttctcaagtgggtccctgacctctgagtagcctaactggaaggcacccccgaagtaggggcagactgacacctcacacggctgggtacccctctgagacgaaacttccagaggaaagatcaggcagcaacattcgctgttcagcaatattcgctgttctgcagcctctgctgctgatacccaggcaaacaggttctggagtggacctccagcaaactccaacagacctgcagctgagggtcctgactattagaaggaaaactaacaaacagaaaggacatccacaccaaaaccccatctgtacgtcaccatcatcaaagaccagaggtagataaaaccacaaagatggggaaaaaacagagcagaaaaactgaaaattctaaaaatcagagtgcctctcctcctccaaaggaacgaagctcctcaccagcaatggaacaaagctggacggagaatgactttgacgagttgagagaagaaggcttcagacgatcaaacttttctgagctaaaggaggaagttagaacccatcacaaagaagttaaaaaccttgaaaaaagattagacgaatggctagctagaataaccaatgcagagaagtccttaaatgacctgatggagctgaaaaccatggcatgagaactacgcgacgaatgcacaagcttcagtagccaattccatcaactggaagaaagggtatcagtgattgaagatcaaatgaatgatatgaagcaagaagagaagtttagagaaaaaagaataaaaagaaacaaacaaagcctccaagaaatatgggactatgtgaaaagaccaaatccacgtctgattggtgtacctgaaagtgagggggcgaatggaaccaagttggaaaacactctgcaggatattatccaggagaacttccccaacctagcaaggcaggccaacattcacattcaggaaatacagagaacaccacaaagatactccttgagaagagcaactccaagacacataattgtcagattcaccaaagttgaaatgaaggaaaaaatgttaagggcaaccagaaagaaaagtcgggttacctacaaagggaagcccatcagactaacagctgatctctcggcagaaactccacaagccagaagagagtgggggccaatattcaacattgttaaagaaaagaattttcaacccagaatttcatatccagccaaactaagcttcataagtgaaggagaaataaatcctttacagacaagccaatgctgagagattttgccaccaccagacctgccctacaagagctcctgaaggaagcactaaatgtggaaaggaacaactggtacagccactgcaaaaacatgccaaattgaaaagaccatcgatgctaggaagaaactgcatcaactaacgagcaaaataaccagctaacatcataatggcagtatcagattcacacataacaatattaaccttaaatgtaaatgggctaaatgctccaattaaaagacacggactggcaaataggataaagagtcaagagacatcagtgtgctgtattcaggaaatccatctcacatgcagagacacaaataggctcaaaataaagggatggaggaagatctaccaagcaaatggaaaacaaaaaaaaaggtaggggttgcaatcctagtctctgataaaacagactttaaaccaacaaagatcaaaagagacaaggccattacataatggtaaagggatcaattcagcaagaaaagctaactatcctaaatatatatgcacccaatacaggagcacccagattcataaagcaagtccttagagacctacaaagagacttagactcccacacaataataatgggagactttaacaccccactgtcaacgatagacagatcaacgaaacagaaagttaactaggatatccaggaattgaactcagctctgcagcaggcagacctagtagacatctacagaactttccaccccaaatcgacagaatatacattcttctcagcaccacgtcacacttattccaaaattgaccacgtaattggaagtaaaacactcctcagcaaatgtaaaaaaacagaaattatagcaaactgtttctcagaccacagtgcaatcaaactagtactcaggactaagaaactctctcaaaaccgctcaactacatggaaactgaacaacctgctcctgaatgactactgggtacatcacgaaatgaaggcagaaataaagatgttctttgaaaccaacgagaacaaagacacaacataccagaatctctgggacacattcaaagcggtgtgtggagggaaatttatagcactaaatgcccacaagagaaagcaggaaagatccaaaatcgacaccctaacgtcacagttaaaagaactagaaaagcaagagcaaacacattcaaaagctagcagaaggcaagaaataactaaaatcagagcagaactgaaggaaatagagacacaaaaaacccttcaaaaaattaatgaatccaggagctggttttttgaaaggatcaacaaaattgatagactgctagcaagactaataaagaagaaagagagaagaatcaaatagacacaataaaaaatgataaaggggatatcaccaccgatcccacagaaatacaaactaccatcagagaatactataaacacctctacacaaataaactagaaaatctagaagaaatggataaattcctggacacatacaccctcccaagactaaaccaggaagaagttgaatctctgaatagaccaataacagtctctgaaattgaggcaataatgaatagcctaccaaccaaaaaaagtccaggaccagacagattcacagccgaattctaccagaggtaaaaggaggagctggtaccattccttctgaaactattccaatcaatagaaaaagagggaatccttcctaactcattttatgaggccagcatcatcctgataccaaagcctggcagagacacacacaaaaaagagaattttagactaatatccctgatgaacatcgatgcaaaaatcctcaataaaatactggcagaccgaatccagcagcacctcaaaaagcttgtccaccatgatcaagtgggcttcatccctgggatgcaaggctggttcaacatacacaaatcaataaatgtaatccagcatataaacagaaccaaagacaaaaaccatgtgattatctcaatagatgcagaaaaggcctttgacaaaattcaacaacccttgatgctaaaaactctcaataaattaggtattgatgggacatatctcgaaataataagagctatctattacagacccacagccaatatcatactgaatgggcaaaaactggaagcattccctttgaaaactggcacagacagggatgccctctctcaccattcctattcaacatagtgttggaagttctggccagggcagtcaggcaggagaaagaaataaagggtattcaattaggaaaagaggaagtcaaattgtccctgtttgcagatgacatgattgtatatctagaaaaccccattgtctcagcccaaaatctccttaagctgataagcaacttcagcaaagtctcaggatacaaaatcaatgtgtaaaaatcacaagcattcttatgcaccaataacagacagagagccaaatcatgagtgaactcccattcacaattgcttcaaagagaataaaatacctaggaatccaacttacaagggatgtgaaggacctcttcagggagaactacaaaccactcaatgaaataaaagaggatacaaacaaatggaagaacattccatgctcatggataggaagaatcaatatcgtcaaatggccatactgcccaaggtaatttatagattcaatgccatccccatcaagctaccagtgactttcttcacagaattggaaaaaactactttaaagttgatatggaaccaaaaaagagcccgcattgccaagtcaatcctaagccaaaagaacaaagctggaggcatcaccctacctgacttcaaaccatactacaaggttgcagtaaccaaaacagcatggtactggtaccaaaacagagatatagatcaatggagcagaacagagccctcagaaataataccacacatctacaaccatctgatctttgacaagcctgacaaaaacaagaaatggggaaaggattccctatttaacaaatggtgctgggaaaactggctagccatatgtagaaagctgaaactggatctcttccttacaccttatacaaaaattaattcaagatggattaaagacttaaacattagacctaaaaccataaaaaccctagaagaaaacctaggcaataccattcaggacataggcatgggcaaggactcatctctaaaacaccaaaagcaatggcaacaaaagccaacattgacaaatgggatctaattaaactaaagggcttctgcacagcaaaagaaactaccatcagagtgaacaggcaacatacagattgggagaaaatttttgcaatttacttatctgacaaagggctaatatccagaatctacaaagaactcgaacaaatttaaaagaaaaaaacaaccccatcaacaagtgggcaaaggatatgaacagacgcttctcaaaagaagacatttatgcagccaacagacacatgaaaaaatgctcatcatcattggccatcagagaaatgcaaatcaaaaccacaacgagataccatctcacaccagttagaatggcaatcattaaaaagtcaggaaacaacagatgctggagaggatgtggagaaataggaacacttttacattgttggttggactgtaaactagttcaaccattgtggaagacagtgtggcgattcctcaggtatttagaactggaaataccatttgacctagccatcccattactgggtatatacccaaaggattataaatcatgctgctataaagacacatgcacatgtatgtttattgaggcactattcacaatagcaaagacttggaaccaacccaaatgtccatcaatgatagactggattaagaaaatgtggcacatatacaccatggaatactatgcagccataaaaaatgatgagttcatgtcctttgtagggacatggatgaaactggaaaccatcattctcagcaaactatcacaagaacaaaaaaccaaacaccgcatgttctcactcataggtgggaattgaacaatgagaacacttggacacaggaaggggaacatcacacaccagggcctgttttggggtgggcggagggggcagggatagcattaggagatatgcgtaatgtgaatgacgaattaatgggtgcagcacaccaacatggcacatgtatacatatgtaacaaacctgcatgttgtgcacatgtaccctagaacttaaagtataataaaaaaattaaaaaataataaaataaaaataaaaaaggaaatcaaatcaaactgtgactatcagcagccagaaatctctttccttccctcttcctatcactgcaccttctttctccccagaggtaactagaactacagtcatgacttctaacaccttaggttagtctttcctgtgcttaagctttgtatacatggaatcatgcagtatatattcctgtgtatctgccttcttttgcacatagacacatagatataaatgtatataagtcttgccagagttatcagttatctttttttcttttttttttgacatggagtctcactctgtcaccaggggagtgcagtggcacagtctgggctcactgcaacctctgtctcccgggttcaagcaattcttctgcctcagcctcccaagtagctgggactacaggcacctgccaccacggccagctaatttttgtatttttagtagagacggggtttcaccatgttggtcaggatggtctcaatctcttgacctcgtgatccatccacctcggcctcccaaagtgctgggattacaggcgtgagccactgcacccggccaagttatcgattattctaagtctttccaaagaaccattttttggcttcatcgattctctttatcatttgtcgtctgttccattaaaatctgatgttatcctcataaatgtttgatatatttggttgtagatctaccctctcagcatttgtgagttcttttcttggtcttgttgtttctccttttttccttctttatttgttggttaaatttgctatttcttaaaactgtttgagatcggtactcagatcaggggttggcaaacttctttccatggcaggacagatagtaagtactttgggctttgcaagctacacatgcttcctgtcacatattctttcttttaaacttaaaatgtaaaagctggttgggcacggtggctcatgcctgtaatcccagcactttgggaggccgaggtgggcagatcacctgaggtcaggagttcaagaccagcctggccaacaaggtgaaaccccgtctctactgaaaatacaaaaattagccaggcacagtggtggttgtctgtaatcccagtactcgggaggctgaggcaggagaatcgcttgagcctgggaggtggaggtttcagtgagccaagattgcgccactgcactccagcttggagacagagcaagactctgtctcaaataaatgaataaaagtaaaatgtaaaagctattcttagtttatgcattgtacaaaaacaggggcagagtggaattggcccatgggtcataatttgcaaacccccaacttagattgttgaggcccagcctcttcttttcacatatatatataaatggttatacatttccagttaattcctcagcatgtaaggattttccacttctctttctgttattgatttctgtcaagcgcacacaccagacaaggcaagagcaaggtctgcctgattcaaccagtaaggatgcgacaggccagttttagatgcagacggtttattacttacatagacagcaaaggagagagtagccaaggtgccagctcccaggtccttgtttcacatgccagaaagcatgacactgaaacaaaagggatggagtgctgcatgagttgtgcaagaccccattgctggggagcctgttctgcgctgcagctaagaggtttcaccgctttattacagttttattttcattcatgtctaccatcctgagggggtgggagaagaaaggcccatacctcatcagaacagtgaggccaggtggagctgtctgatgactgccttgcaggggagagagaaggtgagggagagatgtcctcagagcagtgcctgacagacctcccatctgcccctgtgccagaaggatcccaaggcattctgccaagactcagaccgcggttgaagcctgtgcctgtggggtctctgttggtacctggaaggtcacctgggcacggtggcacagccagtcccctacaattccctgtcctcttccagttggtcagagaagagagtctgaatgatttcagccttttgaaatttgggacttgctttatggcctagcatatgatcaattttggtaaacgttccatgttcacaaagaaacaaaaagtggattttgtgattcttggtgcagtgatctgtatatgttaattggatcgtatttttcatgtgatttaaatccatactgattatttttgtctgcttgttctatcagctactgacagcactttgttaaaacctccaactatgatcgtggacttgtatatttctctttattttctgtcgatttttcctttatataatttgaagttaagaatagacttgtcatagcttcctgtaggactgatattttattataaacttttttctgtcattactaaagttttattttcattaacgtcaacttgtctgacattggtttttctacattagctcttttgattagtgtttgcatgatatatttttaaaatcattctactttcaacctttgtgacagtttgtgattcagatgtaagcaatgtaaaattaaggttttttaaatccagtctgatcatctgttttttacttgaagcattttagtttacctacattggatgtgataactgatctagttggttatagatctaacatctcattatttgcttttgtttgccctgtcatttcctttttcatctttcctgcataattttgtataaatcaaagtatttattaatgttctattctattagcttcttcccggtacattcctttactattcttttggtagttacgatagaggttacgatatacatccttgactatcgagtttcccttaaaatagtacttgtaccatactttggacaattcaaggaacttagtacttctgaacaccatttagccccttctgccttgtatattaatattgtcccataatttgattctctttcaaattccgtagggcaacgttattttctatagggtcaatacccacttggctataatgattttccgttgttctttattttttcctgtagctctgagcttcaatctgagattatttccttctacctaaagaacaccttttagtattttctatagtgtggtcccctggtgataagtgtctgaaatttttttttattttgcatctgcttttaaagaataattttacaagatataggactgtagactggcatttatgtatgtatttacttatttttgaactctgaagatattccattttcttctggcctttattatttccatttaaaagtcaaggtagtcttttttcttatactgtttctaaaatattttcctttatcataggttttcagcagttttattataacatgcagacttgcatttttcttatatttatgctccttggggttcataccacttctggatctgtggcttgatatctttcactaattttagaaaattctcagtcattgtctttttttttctatttttccataggttattggggtgcaggtcgtgttcggttacatgagtaagttctttagtggtgatctgtgagattttggtgcacccatcacctgagcagtaatacactgcaccctatttgtagtcttttttcccttgccctcctcccattcttcccccaagtccacaagtccattgtatcattcctatgcctttgtgtcctcttagcttagctcctacatatcagtgagaacatatgatgtttggtttttcattcctgagttacttcacttagagtaatagtctccaatcttatccaggttgctgcgaatgcctttgattcattcccttttatggctgagtaatattccattgtgtatacatatatatatacaccacagtttctttatctactcattgattgatggacatttgggttggttccacgattttgcagttgtgaattgtgcagccacaaacatgcatgtacaagtgtctttttcatataataacttcttttcctctaggtggatacccagtagtgagattgctagatcaaatggtagttctagttctttaaggaatctccatactgttttccatagtggttgtactagtttacattcccaccagcagtagaagtgttccctgatcactgcatccatgcctcaatctactgttttttgatttttttattatggccattcttacaggagtaaggtggtatcacattgtggttttgatttccatttccctgatcattaatgatgtagagcattttttcatatgtttgttggccatttgtatatcttcttttgagaattgtctgttcatgtccttagcccactttttgacgggattgtttgtttttttcttgctgatttgtttgagtttgggttctagattctggatattagtcctttctcaaatgtatagattgtgaagattttctcccactctggaggttgtctgtttactctgctggctgttccttttaccatgcaaaagctctttagtttaattaagttccagctatttatctttgtttttattgcatttgcttttgggttcttgctcatgaaatccttgcctaagccaatgtctagaaggggttttccaatgttatcttctagaatttttatagtttcaggtcttatatataagtcattaatccctcttgagttgatttttgtaaaaggtgagagatgaggatcctgtttcattctcctacatgtggctagccagttatcgcagcaccatttgttgaaaagggtgtcctttccccactttatgtttttgtttgctttgtcaaagatcagttggctgtaagtatttgggcttattgctgggtactctattctgttccattggtctatgtgcctacttttgtaccagtaccatgctgttttggtgactatggccttaaagtatagtttgaaatcaggtagtgtgatgcctccagatttgttctttttgcttagtcttactttggctatgcaggctcttttttggttccatatgaattttagaattgttttttctaattctgtgaagaatgacgatggtattttgatgggaattgtgttgaatttgtagattgcttttggcagtatggtcattttctcaatattgagtctacctatccatgagcatgggacgtgtttccatttgtttgtgtcatctatgatttatttcaccagggttttgtagttttctttgtagaggtctttctcctcctcagttaggtatattcctaggtattttatttttttgcagctattgtaaaaggggttgagttcttgatttgattatccgcttggtcactcttggtatatagaagagttaccaatttgtgtacattaatcttgtatccagaaactggtgaattcttttagcagttctaggagctttctggaggagtcttcagggttttcaaggtaaacaatcatattgttagccaacattgacagtttgacttcctcatcaccgatttggatgccttttatttctttctcttgtctgattgccctggctaggacttccagtactatgttgaagaagagtagtgagagtgggcatccttgtcttgttccagttctcagagggaatgctttcaacttttcccattcagtattatgttggctgtgggtttgtcatagatggcttttattacattgaggtatgtctcttgttgctgattttgccaagagttttaatcttaaaggatgctggatttgtcaaatgctttttctgcatctattgaaatgatcacatgatttttgtttttaattctgtttatgtggtgtatcacatttatcaacttgcatatgttaaatcgtttctgcattcctggtatgaaacccacttgatcatggtggattatctttttgatatgttgttggatttggttagctagtattttgttaaggattttagcatctttgttcagcaaggatatcggtctatagtttttcttttttggttatgtccttccctggttttggtattagggtgatgctggcttcatagaatgcatcagggagggtcccttctttctctatcttgtggaatagtgtcaaaagaattggtaccaattctttgtctggtagaattctgctgtgaatccgtctggtcctggacttttttttgttggtaatttttaaattaccatttcaatctccctgcttgttattggtctgttcagggtatctaattcttcctgatttaagctgagggttgtatttttccaggaatttatccatctcttctatgttttctagtatgtgagtaaagatgttcatagtagccttgaatgatcatttgtatttctgtggtgtcagttgtaatatctcccatttcatttcttaatgaggttatttggattttctctcttcttttcttggttaatcttactaatggtctgtcaattttatttatcttttcaaagaaccagctttttgtttcatttatcttttgtatttgtttgtttgtttgtttcagcttcatttagttctgctctgatcttggttatttcctttattctgctgggtttggctttggtttgttcttgtttctctagttccttgaggtgtgacctgagaatgtcagtttgtgctctttcagtctttttgatgtaggcgtgtagggctatgaagtttcctcttagcacctcctttgctatatcccagagattttgataggttgtgtcgttattgtcattcagcttgaagaattttttaatttccatcttgatttcatttttgacccaatgatcattcaggaataggttacttaatttccatgtgtttgcatggttttgaaggttccttttggagttgatttccagtttgattccagggtggtctgacagagtgcttaatataatttcatttttctggccgggcatggtggctcacgcctgtaatcccagcactttgggagtccgaggcaggcagatcacgaggtcaggagatcgagaccatcctggctaacacggtgaaaccccgcctctactaaaaatccaaaaatacaaaaaattagccaggcgtggtggcgggcgcctgtagtcccagctacttgggaggctgaggcaggagaatggcgtgaacctgggaggcggagcttgcagtgagccaaggttgcgccattgcattccagcctgggcaacagagtgagactccgtctcaaaaaaaaaaaaaaaaaaaaaatatatatatatatatatatatataatttcatttttcttaaatttattgaggcttgttttgtggcctatcatatggtctatcttggagaaagtcccatgtgctgttgaatagaatgtgtattctacagttcttggatgaaatgttctgtatatatctgttaagtccatttgttctaaggtatagtttaaatccattgtttctttgttgacttttctgtcttgatgacctgtctagcgctgtcagtggagtattaaagttccccactcttattgtgttgccatctatctcatttcttagatctattagtacctgttgtatagatttgggagctccggtgttaggtgcatatatggttaggattgtgatgttttccaggacaaggctttttagcattatataatacccctcctccatgtctcttttaactgctgttgctttaaagtttgttttgtctgatataagaacagctacttctgcttttgttttatcacattagcagagctgattttctggttccttctcatttggtaggctctgtcagagggaaggtctagagctgaaggctgttcagattcttttgtcccacagggtgttcccttgatgtagtattctccccctttcctgtgagctgagctgcagtgattgctatctctcttctgggtctagccatccagcaagtctgcccggctctgggctggtactgggggttgtctgcacaaagtcctgtgatgtgaagcatctatgggtctctcagcgatggatgccagcacctgttccagtggaggtggcaggggggtgaaatggactctgtgagcgttcttagctttggtggtttaatgttctgtttttgtgccggttggcctcctgacgggaggtagcgctttcgagagagcatcagctgtgctagtatggagagggaccagcagtgggtgggaccctagaactcccaagagtatatgccctttgtcctcagctaccagaggaggtagggaaggaccatcaatggggggcagggctaggcgtgtctgagctcagactctccgttgggtcttgctgtgctgcggctgctgtagggaatgggggtgaggttcccaggtcaatggagttgtgttcctgggaggattatggctgcctctgctgagtcatgcaggctgtcagggaagtggggcaattcggtagtcacaggcctcacccagctcccacacaatctgaagggccagtctcacttccaccgtgtgcctgctaacggcaccaagtttgtttcctggcagtgggcaagcaaagctgagaacttaccccaggctatccacctcccagatgcaaaagaaaagggctttagttcctccccatcctgtggaggctacacgtcagattcgcgccttcccctgagttctggccaggaggctcttgcccagttcaaattgttaaaaagttcagcttgagacttccttttcctttgcctctgactgccccccgatccctgtggtgacaggcaagaatggcctgcttggggacccagtgagctcccagggcctttcccgctgcctcctctacccctgtatttcgctcagctctctaaattgactctgctccaggtaaggtcagaaacttctcccacaaactagaccttcagtttccccagtgagagtgtgtgtttgggggcagaggatttccctttcctgcttctgcagtttgggcactcccagtatttggggcatctaccaggtcctgcaggagcagtctgcttctttcagagggtctatagattcctggtttattcctgcagtcattctggatctaaaattcatgatgcgagcctccgcacgctgctctgttcttccaagttggagctacagtctagtcctgcctcatgtccaccattatcttttaaaatattgcttctatcccatcctgtatattcttcctttctggaactcagctacagctggtcactgacttatgatagttcaacttacgatttttcaactttataataggcacttacagtatttttgatttaggatgggtttgttgggacataactccatggcaagttgaggagcttctgtgcacatgtgtcaaaaagcccctttcccatgcttatgtgtatggtcttgtgcttttagctctcattccacacctccacctcccactgtgtgtctgtgtgtctgcatgtctgtaagtctgcttcaaacaatattttcttctgaacttatctttcactttatttattctcttttcttgattgcccagtcagctcttaaccatatgcaccgagttcttatttttagttcatctatttttcagttctagactggacttatttttatgtttctcaattcaattccctgccaaaattctttttttttcttctttgagatggagtctcagtctccaggctggagtgcagtgccacaatctcagctcactgcaacctccgtctcccgggttcaagcgattctcctgcctcagcctcccaagtagctgggactacaggcatgtgccaccatgcgcagctaatttttgtatttttagtagagacggggtttcaccatgttggccaggatggtctcgatctcctgacctcatgatccgcctgcctcagcctcccaaggtgctgggattacaggcatgagccactgcacccagcccaaaattctttaacatctaccatattaaatataattattttagactacagtcatgcatcacttaatgatgagatacattctaagaaatgcattgttaggcaacttccccattgtgcaaacatcacagagttcatttacacaaacctagatggtgcagcctactacacacctaggctatatggtatagcctactgttcctaggctacaaacctgtacagcatgttactgcactcagtaccgtaggtaattgtaacacaatactaagtatttgtgcatgtaatcctatataaatatagaaaaggtaatacattgcactagaacattatgtcaccttcaacatcactaggcaataggaatttttcagctccattttaatcttaagggaccactggtaattttaattgggtcttggatattatatattaagattttgagatataattttaggctatgggtgattttattttttttcctgagaaagtgaagtttgcttattttaggcaactggggtgaggacattagtaatccaaggccactttaagccaatcaggtatttaagtaatttgaagctggccttgattccctactatggctagtttgtttttagtttactctcactcttggggtatagcccttcaagttcccagccaaaagcctggggtgttggccaaggtttgttcttcattgagggccctgagtactagtttctatctgcccagatccataagacttgttaaaagctctcttcagctcctcagcctctcagccactgcttttgtcactggcaatattcccaatggggaaagtaactccaaatgctagtttatctctcttgtctctaatcctctcctagttctcagcttaacattcctcactgcctttatactctctgatgtcatcaaacagatctctttcttatattttgccatgtttcctagttattccagtgtcagtattgttgtaaaacaacctactccaccatttccagaagcgaaactccccagggcagtttgaatttgtttactgtgctatcactgataaacacttacttcattgctggaataagcggacagtagtagttttgtgtatgaaaatttttatgaaagaattctaaactgatttatatgatatataatgtcagcattatataactaatcttgaaataaaatgttattacttaactcacacatgaaaaaaagtgtttgtaaatattacccatttaatgcctagagggtatctggttttgccaattgaataaagggctgctgacttccaaaacagaagtcgtgcgttagacagttaatgtgacagatgttgacatcagctttgtagtgttacagtttacacagatgaatttggtgcaggatgtgtaattccattactgtctgacttagtacatatttgcagtatagggatttttttcaacgtcatgaacacagatgatctgctattgtttacattttactagtcatactaaaaaatccagttaactttgttattcatccatttctgactaatttattttaaacaactccaaaagccaccaatactaagaagtgactcccatgttgggaatgtaacatttttcaagctactaactctgtgcacggtcacgtgtgtgttcataacggaggcctctgaaacctacctcagttctgcaccacttcgtctctccctcccctgaggctaaagcatacctgccagagctttgcacatgaagatggtaaaatagttaaacaaagtttcacaacaaccctgcatatctagcaagagttgtttatgtgaaatataggttattctgcatttacactgagctaaaaattgcaagcaaagagcaactatgatggggatgtgaggccacatgcagatcactggatccaaaccagagacattggttgaaggtcatctagctgtttaattttggttgtggtaaattaggtttgtttttaataatgttcttctaaaatggaaactggactccaagagtatacagaaaggcctgttgatgttggcatttgtggtttccccacaggctccagcagaaatggttcactggttagaatgggagctctgtcctttgtcactccctgtccacgggcacagtggcacagtctccccggtggctggagagagggcgtggaaagagcagagtctgctcaggagtagagaggccagcttttgcatgcagcactgtagcgatgtcacaggaatgcagtcactggagttgcttacgtaaccaacagtctgtgtggcctgaggcatagattaagccatttaagaaaatgagtctgaaaaaataactgattgttctctgctttaatcgatttgttccatgattgcaggctacattggaaagtgagcacggaggcgccccctaatggctttgcccaataggaagcccctcacagccagggaagtttccatgctgttagttggagccactccttgccctacccagttaggatgcaggcccagaggccaccaaggagaatcagccgtccacccaccccagagggcccagggtgatgtttcagaggagagaactcaggtgccaaatgcctgtggtcccatgtgaccagatgcgtggccactgtccccagcacacccctgtgtgtccagagtggcccccacattcctttgatgcagggtccttgatgtctgtggctgcgatagagggagccagaatgatggagagcctcaggctgtgcacacataacccaacacacacctgccacacacatgccacataacatatttaccacccattccccctgcacacccacacgcaccgattctacacagcacagagagagtaagttctaactcccacccaaaatgcaaattatctcatcaaaagcaaactaaaatcaaatacaaaagcaaagaaacaaacagctgtggaaggccctactttctcctggcctggccatgcgtcctagccacactgcacccagagcagagcctttgttccgccctgtgcctcccgggctgctctgctcgtcgtgcctcttgcttgtagaagcttctggctccctggtggctcagttagacccggagtctcatgcaggacctcctttccagtccaatagccagtctggactccagggcacagaggtgaggggcacagctttgccacaagccctgagcacacttgcccatcttgttgagcttctcaccccaccctgccctggaagtcctcccctgggctcctgagtgggagccacaggttgtcctctgacccacttctctggccacatgcatgagccagttactaacttaatgcactttatgtaaaggcactgctctagcagctatttgcaagtatttttgtgaagcagctgaatatagttttctttctttttttgttatactttaagctctggggtacatgtgcagaatgtgcagaatgtgcagttgtgttacacaggtatacacgtgccatggtggtttgctgcacccatcaacccgtcatctacattaggtatttctcctaatgctatccctcccttggccccccacccctcaacaggccccgatgtgtgatgttcccctctgtgtgtccatgtgttctcattgttcaactcccacttatgagtgagaaaatgcggtgtttggttttctgttcttgtgttagtttgctgataatgatggtttccggcttcatccatgtccctgcaaaggacatgaactcatccttttgtatggctgcatagtattccatgatgtatatgtgccacattttctttatccagtctatcattggtggacatttgggctggttccaagtctttgctattgtgaatagtgccacaataaacatatgtgtccatgtgtctttatagtagaatgatttataatcctttgggtatatacccagtaatgggattgctgggtcaaatggtatttctagttatagatccttgaggaatcgccacactgtcttccacaatggttgaactaatttacactcccaccaacagtgtaaaagtattcctgtttctccacatcctctccagcatctgttgtttcctgattttttaatgatcgccattctaactggtgtgagatggtatctcattgtggttttgatttgcatttctctaatgagcagtgatgatgagctttttttcatatgtctgttggccacataaatgtcttcttttgagaagtgtctgttcatataatttgcccactttttggtggggttgtttgttttttcttgtaaatttgtataagttctttgtagattctagatattagcccattgttagatggaaagattacaaaaatgttctcccattctgtaggttgcctgttcactctaatgatagtttcttttgctgtgcagaagctgtttagtttaattagatcccatttgtcaattttggcttttgttgccattacttttggtgttttagacctgaagtctttgcccgtgcctatgtcctgaatggtattccctaggttttcttctaggatttttatggttttaggtcttacgtttaagtctttaattcatcttgagttaatttttgtgtaaggtgtaaggaaggggtccagtttcagttttctgcatatggctagccagttttcccaacactatttattaaatagggaatcctttccccattgcttgtttatgtctggtttgtcaaagatcagatggttgtagaagtgtggtgttaacttctgaggtttctgttctcttccattggtctatatatctgttttggtaccagtgccatgctgttttggttattgtagccttgtagtacagtttgaagtcaggtagcgtgatgcccccagctttgttctttttgtttaggattgtcttggctatgtgggctcttttttggttccatatgaagtttaaagtagttttttccaattctgtgaagaaagtcagtggtagcttgatagggatagcattgaatctataaattactttgggcagtatggccattttcatgatattgtttcttcctatccatgagcatggaatgtttttccatttatttgtgtcctctcttattaccttgagcagtggtttgtacttctccttgaagaggtccttcacatcccttgtaagttgtgttactagatattttattcccttagtagcaattgtgaatgggagttcactcatgatttggctattattggtgtataggaatgcttgtgatttttgcacattgattttgtatcccgagatttcgctgaagttacttatcagcttaaggagatttagggctgaaatggtggggttttctaaatatacaatcatgttatctacaaacagagacaatttgacttcctcttttcctatttgaataccctttatttctttctcttgcctgattaccctggctagaacttccaatactatgttgaataggaatggtgaagagggcatccttgtcttgtgctggttttcaaagggaatgcttccagtttttgcccattcagtatgatgttagctctgggtttgtcataaatagctcttaatattttgagatatgttccattgatacctagtttattgagagtttttaccatgaaggggtgttgaattttgtcgaaggccttttctgcatccattgagataatcatgtggtttttgtcattggttctgtttatgtgatgcattacatttcttgatttgcgtatgttgaaccagccttgcatcccagggatgaagcccacttgatcatggtggataagctttttgatgtgctgctggattcggtttgccagtattttattgaggattttttcattgatgttcatcagagatattgccctgaaattttctttttttgttgtgtctttgccaggttttggtatcaggatgatgctggcctcataaaatgagttagagaggactctctctttttctattgattggaatagtttcagaaggaatggtaccagctcctctttgtacctttggtagaattcggctgtgaatctatctgttcctggactttttttggttggtaggctattaattactgcctcaatttcagaacttgttattggtctattcagggatttgacttcttcctggcttagacttgggagggtgtatatgtccaggaatttatccgtttcttctagattttctactttatttgcataggagtgtttatagtattctctggtagtttgtatttctgtgggatcagtggtgatatcccctttatcattttccattgtgtgtatttgagtcttctctcttttcttctttattagtctggctagcggtctattttgttgatcttttcaaaaaactagctcctggattcattgattttttttaaagggttttttgtgtctctatctccttcagttctgctctgatcttagttttttcttgtcttctgctagcttttgaatttgtttgctcttacttctctagttcttttaattgtgatgttagggtgtcgattttagatctttcctgctttctcttgtgggcatttagtgctataaatttccctctacacactgcattaaatgtgtcccagagattctggtacgttgcgtctgttctcattggtttcaaaggacatctttatgtctgccttcatttcattatttacccaggagtcattcaggagcaggttgttcagtttccatgttgttgtgcagttttgggtgagtttcttaatcctgagttctaatttgattgcactgtagtatgagagactgtttgttatgatttccattgttttgcatttgctgaggagtgttttacttccaattatgtggtcagttttagaaaaagtgcgatgtggtgccgagaagaatgtatattctgtcgatttggggtggagagttctgtatgtgtctattaggtctgcttggtccggagctgagttcaagtcctgaatgtccttgttaattttctgtctcagtgatctgtctaatattggcagtgggttgttaaggtctcccactgttattgtgtgggagtctgagtctctttgtaggtctctaagaacttgctttgtgaatctgagtgctcctgtattaggtgcatatatatttaggatagttagctcttcttgttgccttgatcactttaccactatgtaatgcccttctttgtctcttttgatctttgttggtttaaagtctgttttatcagagactaggattgcaacccctgcttttttttgctttccatttgttgataaatattcctccatccctttattttgagtctgtgtgtgtctttgcatgtgagatgggtcttctgaatacagcacactgatgggtcttgactctttatccaatttgccagcctgtgtcttttaattagggcatttagcccatttacatttaaagttcatattgttatgtgtgaatttgatcctgtcattatgatgctagctggttattttgctcgttggttgctgcagtttcttcatagtgttgatggtctttacaatttggtatgtttttgcagtggctggtaccggctgttcctttccatgtttagtgcttccttcaggagctcttgtaaggcaggcctggtggtcacaaaatctctcagcatttgcctgtctgtaaaggattttatttctccttcacttatgaagcttagttgggctggatatgaaattctgggttgtgttgagtagggtttctgcagaaagatccactgttagtctgatgggcttccctttgtgggtaacctggcctttctctctggctgcccttaacagtttttcctgcatttcaaccttggtgaatctgacgattatgtatcttgggattatgtgtcttggggatgctcttctcgaggagtatctttgtggtgttctctgtatttcctgaatttgaatgttggcctgccttgctaggttggggaagttctcctagataatatcctgaagagtgttttccatcttggttccattctccccatcactttcaggtatatcagtcaaatgtagatttggtcttttcacataaccccatatttcttggaggctttgttcattccttttcattcttttttctctaatcctgtcttcttgctttatttcattaatttgatcttcaatctctgatatcctttcttccgcttgatcgactcggctattgatatttgtgtatgcttcacgaagttcttgtgctgtgtttttcaactccatcaggtcatttatgttcttctctaaaccagttattctagttagcaattcgtctaaccttttttcaaggttcttagcttccttgcattgggttagaatatgttcctttagctcagaggggtttgttattacccactttctgaagcctacctctgtcaatttgccaaactcattctctgtccagttttgttcccttgctggcgaggagttgtgatcctttggaggagaagaggcgttctggtttttggaattttcagcctttttgcgctggtttctccccatcttcatggatttatctacctttggtctttgatgttggtgacctttggatgggatctctgagtgaatgtgctattcctttctgtttgttagttttccttctgacagtcaggcccctctgctgcaggcctgctggagtttgctggaggtccactccagaccctgtttgcctgggtattaccagcagaggctgcagaatagcaaagattgctgcctgttctttcctttggaagcttcctcccagaggggcatccaccagatgccagccagagctctcctgtatgaggtgtctgttggcccctcctgggaggtgtctcccagtcaggatacacaggggtcagggacccacttgaagaggcagtctgacccttagcagaactcaaacgctgtgctgggaggtccactgctctcttcagagccgtcaggcagggatatttaagtctgctgaagctgcgcccacagccaccccttcccccaggtgctctgtcccagggagatgggagttttatctataagtccctgactggggctgctgcctttttttttagagatgccctgcccagagaggaggagtccagaggcagtctggccacggcggccttgctgagctgtgatgggctccacccagttcgaacttccctgcggctttgtttacactgtgagggtaaaaccacctactcaagcctcagcaatggcagacgcccctccccctaccaagctcaagtgccccaggtcgacctcagactgctgtgctagcagcgagaatttcaagccagtgcatcttagtttgctgggctccatgggggtgggacccactgagccagaccacttggcttcctgacttcagccccatctccaggagagtgaactgttctgtctctctggtgttccaggcaccactggggtatggaaaaaaaaacctcctgcaactagtttggtgtctgcctgaacggctgcccagttttgtgcttgaaacccagggccctggtgacataggcactggaaggaatctcctggtctgcaggttgcaaagaccatgggaaaagtgcagtatctgggccggagtgtgcatagttcctcaggctcagtccctcacggcttcccttgggtaggggagagaattccccgaccccttgtacttcctgggtgaggcgacgccctgccctgcttcggctcgccctctgtgggctgcacccactgtccaaccagtcccaatgagatgaacctgtacctcagttggaaatgcagaaatcacctgccttctgcgtcgatctcactgggaactgcacactggagttgttcttattcaaccatcttgccatcaatctgaatatagttttcaactgaaatcttagggcgtgcccacatgtcaaataggtggaacttcgctggctgactgcgagcggagagccagagcctcccctaacctaggggcaacatcaccaccacagaactcccaggctctcccggaccaggctcccttggccatcatataaacctccagggccactcagcccatctcagccctggccacaggggactggaaacacgctgctcttcctgtctgaaaactcgaaagttcccactgcttttactcacacccacagccggtcatcagaaatcctgctggctcccctcagaagcccagcagcccctctatgggggtccacagcccaggctctatgccccttgccttgcccactgcttctacttttcagacagcagccagagccaaatataaaatagaagtcattcagtttctccaaaaacaagaagggctgggcagggtggggtactgctggaagctgattggggttgtactgaatctctgaggacctaggggaggacagtcctccagaagagagctggagggcttgcaggccctgacttccagctaaagtgattgggtaatatgagcatacacagagaccgtgtatcccagaacaggatggagtccagagagaggcctgcaccaagggcaaggggaagaaaggaaagtcttttcaacaaaggtgctgaaacaactgtaaaatggtatgttaaaaaaaaaaaaaggagggccttgacgctctgcctcctaccatgcatacgaattacttcaaggcaggttaggcctaaatgtaaaaacaaaacctaaaaagcttctagaagaaggcatggagggaaaatcttcatgaacttggagttggcaaacatgttttagagaggccaaaaaagggctatggaaaggaagacaaatgatgaattgaatttcaccaaaacaaaaaattttggttcatcaaaagacacttaaaataaataggctgggtacagtggctcacacctataatcccagcactttcagaggccaaggccggcagattacttgagcttaggaattccagaccagcctgggcaacatggcaaaactctgtctctacaaaaaaaagaaaaaaaactagccaggtatgatagcatgcacctgtggtcccagctacttgggaggctgaggcaggaggattacttgagcccgggaagcagaggtttcagtgagctaagatcatgccactgcactccagcctgggtaatagagtaaaaccatgtcttaataaataaaataaaataaataggtaagccacaaactgggaaataatattcataaaacatgtatctgatagagcacttgtatctagaatgaataaattacaaccacaaattaattataaaaatacaaacaatagaaaagtgagcaaaagacttaaaaacagaaaagaagaagatacatgaattaccagtaagcacatgaggaaattttcatattagtcatcaggcaaatagaaattagaaccacaatgagatatcactgcacacccaccaaaacaaaaaaaaattaagaatgctgacaatacgaagtattagaatgatgtggaaaaatagaactttccaatgttacaaaggcaaaataataaaaccactttgggaaacagtttggtggtttcttacaaaattaaaaatacatttaagcccttaacccagcaattctactcttggatattaactaaagaaaaatgaaaacatatgtccacaaaaagacttactggaatgttcgtagcagctttacttataatcacacaaacctagaagtaacgcacatatccctcagcgagtgaataggtgaattcactgcagcgcatccgcacagtagatagtactcaatggttaaaagcagtgaactactgatgcatgctgcaacacagatgaaactagagaccttattctgagcacaccaggagagacacggaagacacttactgcatgattccatttatatggagctcaagagcacaggggccatgtagaagacaagattctacagatgtccctcaagattcctgttccctgacattcagccaaacactgctctggttaccactgcgaagggactttgcagatggaattcaggtcgctaatcaggtgactttaaaatagattatcctggattatctaggtgggcccaaggtaatatcaagggcttttagaagcaaaagaggaagacacagggccctgagagaagaggaagaagaggtcaccgagacttgaagtataaaggggactccatcagtcattgctggcttggggatggagaaaggggccacaagccaaggaacataggtggtgtctggacactgacagtgacctccagctgacagcctgcaaggaaacagggactcagtgctacagccagccacctggaacagggtcctggcacacctgaaggaggctggaagccaattctctttcaagcctccaggagggaccacggctctgctgacacctcttcagccttgtaagactcagagcagagaagccagctgagcctactggacatccagcctacaaaactgtgagatagtaaatttgcactgttttaagctactatgtgtgtgatactttgtaggaaatgatgccagagggattggctgggaggggcatggggccatctgatgtgatgaacttgatgtagccgtgatctacttgatcatgctagtggttacagtgatgtgcacacttgaagaagttcacccagctgggcacagctctgggcattcattctaccatgtacaaattatccagacataaaagagaataaaaccctgtcatttgcagcaacgtgtgtggaactggaggtaattgtgtaagtgaaacaagccaagcacagaaagatacattttaaaacttttaattaaatgaaagactgtgagaacatttctgcagctaagaatctgccaatggtctggtctcttccaaggtaaaatcttgcgtccttaccatggccccatgctgcacactccaggcacaggcttccctgtccaactcatcgatagactctacagccacacaggcccagggcacagtttgaccgtgatgttctaatgaccaagaatgctgccctccaaatagccacatcactcccttcctcatttcttcagatgtctgtcctgaagtcatcttattagggaactgtttggtgcctgagtattaaaacagcacacagtaggtgccccctgaatctctgatgaatgcttgaacatggttcctgggtggacacagtccccctgatgcatgcaggtcactgagggatgcagtctcctgggaagacaagtgctcctgggtggacagggcctcccagccctcaggctcacacagcacagtgggttctgcacctgcacccatccctgtcaccaccctcatctgcttctcctgggtacccagccttctgcaccaggcaacctgggaagagcggggcaggcactgctcacccaaattctgatccctccatgagtgggggctcattattttgtagacatagagatccagcaggatttcattgaatctgaacaagcaggaaatttcctaggacaagcagcctttttctgtcatttgtgtaggctggttggccacccacgccagctctctaactgtgctctgggcttgatgacctggccagggtgtgaggcctggaccctggtggcttgcagcagactccactgctaaccctggcatacacagacactgtgggaaggaagcgagtggacttcctggtaaaataagatggaaagagctagaaggctttctttagaagtgacaaattaagctcctcctggaagccagattggaaaacactcaagagacatgaagtgatttatttctcatgtctttgggatttagttttatttcagttttaaaaaggtgcctcgggaatttttaactgaaacgatttaactgaaaggaatggatttctttcttaagtaccgtgcagatctcagaaccagggtgcagagtgcctggtaaatcccacatgagaaggctgctgtcactctcagcaagcatactttaatttttaggactgaattcattttgacagttggcttcactgtctttgatatttttatgaaaatcagtatttcaattcctttttaagaaccattttaaggttaaaggccaggagaccttactttggtgaatgaagttaacggtgttgctgatttcagtaagtagctttttaggctgtctagaaagatgattgggctcagtgagaagattgacttgcaagttaactctggctttctgcagcatgacgttttattccaacaggttcccacctgcactgaggcaatagtagaaacactgttgcttacacatcgggggaatggcagagagtggggctgagtagaaatgaatatagccactgaattcatttatttctctttaaaatcaacttatatgttttttaaaaattcatctgacactttgaaatgaaattatatattttctaaaagtcccccccgctggactatcattttggtcctctctggtcccgccctacagcccagccccgctgacctcctgttgtatacatgagccagaggtggcctccatgtcctggcccctaggctggtggacccattcactgcagacccatttgctgaaagtctgcccgccccaaattcaagtttttacatatccagttgttttaaacataggccaattataagcagagttttcgccacggagagcctgccagctttgcatccagcatgaaacctccccagcatccactgcccactggtaagatagagccttgtgtctataaagccccgagatgctgctgccctcagagctctgaccccgagaccccacttctgagtgacatcacctgggcacgtgtctcagtctaggctctctggtgaaacagaaccaataggagatgtaggtcctgtgtgcagtcatgtgccacataatgactttgaagtcaatgatcgactgcatattccatggtggtcccataaggttacagtggagctgaaaaattcctatcaccgaatgacattgtagctgtcatgtatttgcagggatgctgcaaataaatctactgtgctgccatttgtataaaagtctagcacatacaactatgtacagtacataatacttgataacaaatgactatgtaatgggtttatgtatttactatgctatactttttatcatcattttagagtgcatgccttctatatatatatatatacatatatatatacacgtgtatatatacatatatatatatatatatatatatatatatattttttttttttttttttttttttttgagacagagccttgctctgtcacccaggctggagcgcaggggcacgatctcggctcactgcaagcgccgcctcctgggttcacgccattctcctgcctcagccttgcaagtagctgggactacaggcgctcatcaccaagcatggctaattttttgtatttttagtagagatggggtttcaccatgttagccaggatgttctcgatctcctgacctcgtgatctgcccgcctcagcctcccaaaatgctgggattacaggcgtgagccaccgcgcggccctacttatatatttttttaaagttaatgtaaaatggcctcaggcaggtccttcaggaagtgttccagaagaagacattgttataagagatggcagctccatgcatgtcactgcccctgaagacctaccagtgggacaggatgtggaggtggagacactgatacggatgatcctgaccctgtgtgggcctaggctaagaaaaaatgtttaattttttttttaaaaaaagattatagaataaggatataaagaaagaaaatatttttgtgctgttgtacatatgtttgtattttagtctaagtgttagtaacactttgtaatacaggagtcaaaaagttttaaaaatttataaaataaagtaagctaagtttaatgtattgttgagaaagaaaaaattaaattagtatagcctacttgtacagtgtttctgaagtctacagtagtgtacagtaatgtcctggccttcacattcactcacctctcactcactgactcatccagggtaactcccagtcctgtaagctccattcatggtaagtgccctgtgcaggtgtaccattttttattttttataccatatttttactgtacttttttatttttagacatgtttagatgcacaaatacttaccattatgttacagttgcctacagtattcagtacagttatatgctgtgcaggtttgtagcctaggagcagtaggctgtacacagagcctaggtgtgtagtagtctatgccatctaggtttgtgtaagtgccttggtgatgttcgttcgcacaatgatgaaatcgcctagtgatgcatttctcagtaggtatttccattgttaagtggcacatgaatgtgcagtatgcacacatatccatacatgtttgtgtgtgagtgtgcatgtacatgtatattatagagagagtgggggagagagacagacctattataaggaattgacccatgaggttatggaagctgagaagtctcacgacctgcagtcagcatgctggagaactgggagagctgggggtgtaagttccagctgagtccaaggccagctcgatgacagtcaggcagagagagtgagtttcctcttatttagccttttgttctactcagcccttccgtggattagatgaggcccatccatgttggggagggcaatgtgcgttgcccagtttacaaatcaaaattaaatgttcatctcatccagaaataccctcacagatacacctcgagtaatgtctgagcaaatgtcttgtctaggtaagctcctgctctgaggatgtgccccttccccatgtatccgctgcagaccactccaagctctcccagttaagcttgtgcatgccgctgcctgcttgtggtctcatctcttttccttgttaagccaccaaatctctcaaactcccaacacctctatgcagatggtggttttgcaagcctctgagcctttctatgttctatgccccatattgccctccctcttcctctcccgggaagcttccactcctcgctcacaaatagcaggatgtgtcagcccttgtgcagaccccctggctcctctgcaatacctctcagtcatcccagtccatgacagttgttcccatgtctgtcttacctcttactctgttagcctcttaagaagcacatacgcatctttattcatatccatgctatcagcacccaaggatgcctgcacgtacagggagcctcgtgggggtatgctcagtgaatccatggccacaagccagccagccttccctaaggcacagcatggagcacttccttttctgtagctataggctgttcagtttagctatttcttcagctgccatgaaaacgcttttaccatatatttgcatcattgtttagattaattgtattctgagtacagagaacccaagcatctggaaatacttaagaattcactttgtttataagatatggagtgtgtgaagcccaaaagtagaatttatcaggctgtaagtacatattcttttatctattcatacaacaataagataatttcgtctgtggaataagtcaacaatgaattaatgcctgctatgtatgtatgtgtgtgtgtaaggtatttccatcacgtgatgaatgatgatatatgtgtgtttaatttattattgtatatgtgtatatacacatacaccaaattacactatgcacatactatatacatacacacatatacaataataaacacacacatatatagtcattcatcactgaatgacagaaataccttatgagacatgtgattggtaatttcatcattgcacaaatattaaagttcacttccatgaagtagatggcatagcctactacatacctaggctctaggctataacctattgatcgtaagctacaaaactataggcaattgtaacacagtggtgagtatttgtatatctaaacatagaaaaggtatgtgttgcactatgaagttacaaaagctgtgatgtcactaggtaataggaatttttcagctccactatactcttgtgagaataccattgtatgtggtctgtcattgacggaattgtcatatagcacatgatggtgtgtgtatgtatgtgtgtgtataattataacttgctcttctttcactcagttgatatatatataaccaaattgaaaggtttttttcccaaaattattatccttttatcataagaatatactaattatattttacattaccatgagattgatagtttcaatactaatcttacagagtaacacaaaatagttatcattcagtactaaaactgaatgatttacttttctacattatttagccagttgtttgaaatagttgagtacacaatttagtttagcttttggatgtctgcatattcattaaaaataaccaaaaggagccagttagttacccaaacaatcacatccgccaggcatttaggtaaactgaggccctgaggatattagtataaattcattgaaaaaatgcaaacaaaatgagaaaatacaggtgggcatggtagctcacacctgtaatcccagcattttgggaggccgaggtaggcagatcccttgagcccaggagttggagactagcctaggcaacatggcaaaaccccgtctctacagaaaaaaaaaaaaaaaaaacaagcccaggacagtggacacctgtagtcccagctactcgggaggctaaggtgggaggattgcttgaacctgggaggcagaggttgcagtgagccaagatcatgtcactacacgccagcctgtgtgacagagtaagaccctgtctcaaaaaaaaaaaaaacccagaaaaacaaaatgagaaaataaaagtcactcctgatcctactctttaaagagaatcccaaggctattttgatatctcttctttcagttctccatacacatatccatatacacacgtgtgtgtagatgtaatatgcgtgtatgtatatgtatacatacacaggatttgtagcatacatctttttcaaatgtttgaggtagaagcaactagctgtttccaaaacccatctttccttctgcctaagcaggctacgaggcctcatgtcccagtctcccttgcacttcaatgtggccatgtcacccaccccacagtggaacaacagaaagtgtgccatgtgcccttctaggctggcccatcataggctgcctgaggaggtgaagtttgaggagagtctgcagtgaagccaagaggaagaggccctcctcccctctgagtagcaatccctgccctccaggctgccatagtccctggaaaagcagtctcggctgtgagggacttcccctgtccctgctggttgagtgggctgctgccgcccaggcagccttggaagccacgtgtggaagatggtacctggatccctggatgagtgtgtggagcggaaccatcagaggcctggactccaccctggactgctgtgtgcagaaaggaataggccttttgtgtttaagctcctgatgggaggcaggaggctctactgattgccacagtttaacctaccctgattcattatttctgttaaatattgaggtggtacaaaattaatttatcagaattcattatgaaaatacccagcttagaaagggtgaggggcatggaatttgtcattaactttgaaatccctttgtgtttcttgctaacccatcatgttgcctccccctgggaaacgaccactcacctgaagtttgtgtttacctttcccttgctttcccttagcgtgttgccatgcatgtctgcacctgtagtcaatatgttgcttagtattgcaagctttggccttcaaataaatggagccagactgcatgaatatttaggaactttctcctttcctacaacaagatattcctgagactcctctgtattgttgtatggaattaaattgctttttcattgccacatagcattccattgtttgaataaaccaaatgtatttgttcattctacttttgatgaacatttgacttgtttctcttttgtgctgttatgaacagggctgctgtatgcatctttagtggctctatgtgcatatggcagatgtacgggcatttctgtagggattataccaacaagtgggattgctggatgccaggacacagggtattttagataaaaaggtcagggagagcctttctgatgaggtgatagctcaggagagaccacaatgaagtgagggagaaagagtgcagatattttgagaatgcataatccaagcagaaggaacagtgagcgttagggccctatggcagaaagccctggcccaggtcagagtggctggagcccaaagagggacagcaggcgaagtcacttggtgcccggggccagattgccaagggcctggaggccatggggaagactccgaagttatttggaaagtgattgaaagtccctggggtttcaaaggagaggaacatgataagatttacattttctttttttttttttttgaaatggagtctcagtctgtttcccaggctggagtgcagtggcacaatctcagctcactgcaacctctccccctgggttcaagcaattctcctgcctcagcctcccgagtagctgggattacagacgcctgccaccacacctggctaatttttgtattttttttttagtagagacggggtttcaccatcttggccaggctggtcttgaactcctgacctcgtgatccacctgcctcagcctcccagagtgctgggattacaggcgtgagccaccgcgcccggccaagatttacattttcaaagggccactctggctgtcctgtggagaacaggtgacagggcacactggggtggaagtaaggagaggaaccagaagcctctggcaataatccaagcaagagatgcagccaacctagggtggcaatggtagagattttgattatgattagatcaagaatgcatattttaaggtgaagctgcaaggacttgctgatgtcgggtgtgagggtaagaacagagtcaagcatgatgcatggatctttggcttaggctgtgttaggcttgggatgctcttagatagccgagcagaggtgttgagtcaggagctggatgtgtgagtcaagagttagcctgaggacaaaactccaggagtcatcagtatttagatggcactcacagcgagcagccctggcgggcaatgtgggtggagaagagcagtggtcctggggctggagcccttcagcaagcagaggccaggaggaggaggaggacccagcaggggagacccagctgagcagtagtggagagggggcaagccaagggaatgtggcatcccagatgccaagaagaacatggctaagggagtggctagctctcagtgttcctggggttggcaaagtgcaggccatcagtgctagggacatgggtggtgtaaggggagtggtgggagtcggggaatgagaggaaaatgaggagagtgggccaatcgtgttgtttttaactttcagactcttcagacttacactgccccttagagatgaatctcaaccatctctccttaacattgccaaaactgggactcaaagaggaggcagaagttgcccaaagtcacaaggcaagctcacagcagggctgtggccaaaatctggcccctgacactccccgctcttctgactcccacccctgagtgaatgcctgtggtacccacagccctggggggctgctgtgcagaaaaccctaccctcagtccttctaggacttgctatctaacacaccatagccatgttgtaaattgataggtatgtgagctattcacactgtatgtatggaatttagactttcatttaaattcagggtaaattcatttaaagaaattgactataaaagctgaggctaagcctcccacccaccacatctgcgctgtctgcagagtctttatgttctgcctgcatttcccttctttggtcattctatcctggaggaaagaaaccagataaatggattcactcctagagtaataggaagggttaatagtaatcgtaactggcaggagcctttctccatagggtgaaccagcgtagcctcaccttcagaattcctgctgagggaccatcctgaccctacctgcctttcttctattttaatgtatacatttatattcacatgcatatgtcattttgcatgaatggtatcataacatatatatcatttgtttctagaaaaagtcttctttgttgcttggctcatcccaatccctccttcctctctctattgatgtcattacaactcccggaaacccatgtgagcaagctagtatgtgttcttccatatttttctccaagctcaaatagtggtctgtagacacctatgtacatatacatctttatgtatacacatatatgtatacacatatgaatacagccggggctctttctggagcacataagaatctggaggttgcaagtgagaaggattttcagaccaccacttagaggcttgcaccccagctggaagggtagaggagtgaagggcagggaagccgcagatagaaacacataactcaaaggtcaagctctcaaccctggggatgccgggtggggacgcactgtgctgtcacagcctactgccccagagcaccgaagcagctcacctgtaggtattctcctgggtgcagcatgactcacaggcagagccactgtcaccatctgggctgctgaggatgagattccccagagctgggccagaagctgtctgtttctgctcgcagctaacctcagtattcgaagacttctcctgctgccttccacgcctcgcatgaatgtttgtcatttgagaacctagagcttgtctggaaagcagttctgggaagtgccattccaggctgttcccaaattacgcagaggagaatgaagggaggggaaaggttgagcacaggctctccagcaccatccaccccttttgtcaaatcctcacccatccatatcctttggcccatatctaaccagcaagcaacagcagtaacatcgtgccctgctaattttactcttcttcattccactggaaatgtgcatgcatctcaccaacaaagggaggcgcaatgtcctccaagtcaccaaacccatcttgagttttgttcatttgccatctagctcactcacaacccatttgtgataaactataccttaaagactgaattaagagtttaatttctcctcatcaataggtcttatggcatatgacaaggaagcaagagggcacataggatttctatactccactagataaatcaccaaaccggagagaaataggcaggccatcatgatcttgaacactgcaccttgcagactccagctgacgtgtctgtgacccttttccactgcatctattgggcaccccttgtctgcagcaagcacccagactttcatatccaaagagctcagcattagttgctgctggtgacatgttcctatgtactttcttcagatttctactggcaacaatcttgcgattctttggatgtgtatggtatatcctcccaggctgtcttcgtagttaagaatctgattccaaaacaagctgggttttaaggtgacgtaggcatccccctgtaacttgtctgctcaggcaaggtcattagcaggtcttcagacaaggagaagcttctctcagtcaagtgagcagaggctgctttgttgagcccagggcgggtcagttgatgttgatgttggatttcaaggccctctggtttgtcaaaaaccacttaagtgttctcaggatcccatccagctccaaagccccagtcttgtgatcactgccatactatgttcttaggaggtctagcaaggctttcaattaaacttgtgtaattcatcagtgtgcagtgtcagaaaggtctggctctttggatcaatgcctccatggctataagagctaagaggttccttaaaggaactgggagctgtgactccacagctatacctggagctgagaattaaagcttcccttgtgttcctgttgctctctagataagtcatgaagggtcagcccaccctgctgtctttgtgctctttcttttcatcagagttgtcaatctataccagctgttgatttgcctgcactgacagagacctcatctcatctctgtgctctgttttcctggaaccatttccagtatgaaattctgtatccatcaacatttgcttaaggagacagaagctgttctaggtattccaagtaggaaggggaactagaggtttacacaaccagtgcaactgcatgaaatcagagaagcgttgctaactacgggaggttcagcagggttccctggaggtcatggacacctcatgagtcccagggagcatcacacagtccattttcacactgctgataaagacatatctgagactgggtaatttataaagaaaaagaagtttaatggactcacagttccacatggctggggaggcctcacaatcatggtggaaggcaaaagtcatgtcttacatggtggcaggcaagagagagaatgagaaccaagcagaaggggcttcccctgataaaaccaccaaatctcatgagacttattcactaccatgagaacagtatgggggaaaccacccccatgattcaattgtctcccactggctccttcctacaacgtacgggaattatgggagctacaattcaagatgagatttgggtggggacacagccaaaccatatcagcatctctgccactacccttctcagtggcctggatttacaaagcaggtgcttcacaggagcttccctggcagctgcagcaaatctcatgtctgcctctgccatgcatctgtgcaactgcatccatagaaaagtggcctggcttcatcttccaccttgcatgaatgcctcttgctagagactatcactagactgcaccagaaagagagttctgggaaaagtcctgcaagcttctctcctgcagtgctgcagggatggagaaaggcagtggtggtgcagaactgacactgaccttggacagtaaggcacaacatggaccaggcaaggacgctgttgctttattttgccaaactgggttgcattgaacacactttccagcatactgcttttctcactcaacaatccttcactgaaatccctcaaatcatatgtacatgcaacttccttctttttaatgctgattaatactccagatgtggctttcagtaattcagccagccaagtagatcatgaacacttccttttccctcccttctccctccagttggtcaccaagcactgcagattctgccctcattacctctccaaccctccacttcttcatcctcatcatccctcattgacattgctgtggtattgatatggttttgctatgttcccacccaaatctcaccttgaattgtaataattcccatgggtcaagggcagggccaggtggagataattgaatcatgagggcagttttccccatactgttcttgtggtagtgaataagtctcatgagatctgatggttatataaatgagagttcccctacacgagctctcttgcctgctgccatgtaagacttgactttgctcctcattcaccttccaccatgattgtgaggcctccccagcatgtgtaactgtgagccaattaaatctgtttcctctacaaattacccagtctctggtatgtctttattagcaggatgagaacagactaataaattggtagtggtagaatggggtggtgctgtaaagatacctgagaatgtggaagcaactttggaactgggtaacaggcagaggttagaacagtttggagggcttagaagaagacaggaaaatgtgggaaagtttggaacttcctagagacttgctgaatggctttgaccaaaatgctgataattatatggaccataaagttcaggctgaggtggtctcagatagagatgaagaacttgttgctaactggagcgaaggtgactcttgctatgttttagcagagactggtagctttttgcccgtgcactagagatttgtggaagtttgaacttgagagagatgatttagggcatctggcagacgaaatttctgagtagcaaagcattcaagaggtgacttgggtgctcttaaaagcatgttgttttgtgtattcacaaagatatggtttggaataggagcttatgttgaaaagggaagcagagcataacagtttggaaaatttgcagtctgataatgcagtagaaaagaaaaacccattatctggggggaaactcaagccagctgcagaaatttccgtaagtaatgaggcatcacattttaattgccaggacaatggggaaaatgtctccaggcatgtcagtggtcttcacagcagcctctcccatcacaggaggcctggaggcctaagaggaaaaaatggtttcatgggccaggcccagggccttgctgctttgtgcagtctcaaatcccagccatggctaaaaagggcccatgtagagctcaggccactgcttcagagggtgcaagtcccaagccttggcagcttccacatggtgttaagcctgcaggtgcacagaagtcaagaagtgaggtttgggaacctccacctagatttcagaggatgtatggaaatgcatgggtgtccatgcaaaagtttactgcaggagcagaaccctcatggagaacctctgctagtgcagtgtggaagggaaatgtgggatgggagcccctacacagagtccctactggggcactgcccagtggagctgtgagaagagggccaccatcctccagaccccaaaatgatagatccaccaacagcttgcactgtgcacctggaaaagctgtagacactcaatgccagcctgtgaaagcaactaggaggagggctgtaccctgcaaagccacagggtggagctgcccaagaccatgggaacccacctcttgcatcagcataacctggaagtggcatggagtcaaaggagatcattttggagctttaagatttgactgccctgctggattttgaacttgcatggggcctgtagccccttccttttggccaagtgtttacccattgcatgtacccccattgtatctcggaagtaaccaacttgctattgattttacaggctcgtaggtggaagggacttgccttgcctcgagactttggactgtggagttttgagttaatgctaaaatgagttaagactttgggggactgttgggaagggatgataatttttgaaatgtgaggacatgaaatttgggaggggccgggggtggaattatatggtttggctgtgtcctcacccaaatctcaccttgaattgtaataatccccatgtgtcaagggcagggtcaggtagagatagttgaatcatggggacagtttcccccatactgttctcatggtagtaaataagtctcacaagatctgatggttatataaatgtgagttctcctgcacaagctcttgcctgccaccatgtaagacatgactttactcctcattcaccttccaccatgattgtcaggcctccccagccatgtgtaactgtgagtcaattaaacctctttcctttataaattagacagcctttggtatgtctttactagcagcatgagaacagactaatacaggtgtccacctagcattcattttgcaccagtattgcgcaaatgcaaatgcagtctctgctatgcaaccagagtaatttttcttaaatgcaaatactttattttctaaattaaaaatctcatcaagtttcacccctattgaaaatgcctcagtgactcatctttgcctttgaggtcaaatctaaaccccactgtacaattcctgcagggcatctctctcctggcatctcatcctccctgccgccctgctaccatcatcctaaccagacctctcctcctgctgccctccacttcatccacacttaatgacctcagtaccttgaatgtacttgcccattctactttcaggtttatccagacgcaactttctgtccagtaacacccctctccctgctcaccctgctggattctttgccaagacaacttttactcttctttttgatctcagactaaaatgacacttctcccagggagccccttggatcccaaattatagtggttctttcctagatatcctggtggaatctgtacttctacatagcacatagttttcactgccattgtttgttctctgtatttttccctacattatttaggaatgcgttgggctccaagtaatggaaaacacaaaacagtggattgtgtggtacagatatgcacacgtgcactcgcacacataatatatatagtgtgtatgagtgcacatatatactatctagagagagtatatatgtattgaaactgtggattaggggagctattgtatgtgtgtgcatgtgtatacatgtgcatatatacatatatacatacacacatgcacatacatacaatagccccccttatccacggtttcacttttaaaggtttcagttttacctgtggtcaatcacgatctgaaaatactaaatggaaaattccagaaatcataagttttaaatcatgcaccattctgagtagcatgatgaaatctcactctgatgtgaatcatccctttgtccagtgggtccaggctgaacatgtcacccacccgttcatcactaagtggccatctcggttatcagatcagctattctggcatcacagtgcctgtgttcaagtaacccttcttttacttaatagtggccccaaagtacaagaacagtgatactggcaatttggataagacaaagagaagccatagtgtgcttcctttaagtgaaaaggtgaaagttcctgacttaaagaaaaagatattttttattacagtatttgttacaatatactgcacctgcactgtgggcctgctgctttttctgcccaatccccttacaaacttcctgcctcatgttttttcctcagatttttccaggacctgaccttcttcagatacaaacctcttgtatgtgatatgagttgcaaacattttcccaaatcgacaactgtcttttaacattttgtgcatatttgattctctttggggctttttcattgttaacgaaaagagtcaaactctgaaatatttggagagacatttggagccaaatatgagtgaccatggcccatgacacaggtctcggagatcctaataacatgtgcccaaggtggttggggcacagcttggttttacacattttagggagacatgagacatcagtcaaatacatttaagatgtacactggggccaggcacagtggcccatggctgtaatcccagtgctttgggaggccaaggcagcagatcacctgaggtcaggagtttgagaccagcctgaccaacatggggaaaccccacctctactaaaaatacaaaaagtagctgggcgtagtggcaggcgcctgtagtcccagctacttgggaggctgaagcaggagaattgcttgaacctgggaggcagagattgcagtgagctgaaattgcaccacggcactccagcctgggtgacaaagtgagactctgtctcaaaaaaaaaaaaaggacattggtttggtctggaaatgtgaaacagtgcaaagtgggggcttccagattataggtagatttaaaatttttctaattggcagttggttgaaagagttattaatagaaaggaatgtctggtttgtgataaagaggttgttgagaccaaagttttattatgcagatgaagccttcaggtagcaggcttcagagagaatagattttaaatgtttcttatcagacttaagtccaattagatgttaaatgctggatgttaaatgtggatgttaaatgctggtcagcttttaaatgctggatattaaatgtggatatttaaatgttaaatgctggatgttaaatgctggtcagcttttcctgcattccaaaaaagaggagggcataatgaggcctgtctgactcctacttcccaccttggcctgaaccagtctttcaggttaaattttagggtaccctggccaaggagggagcctatttagatggttgtcggggggccttcaaattttatttttggtttacactattatgttccattgttgagtctgatcagagactagtcattgaggcagtagagttcatgccagtgtctcagagtgctccttccttctctttgtacttacttttcagagtttctctggttattcttgcttattttttgatgtgaatttaaaatcagcttgtccgattccaaggaaggaaaacaaaacctgcttctgtgttgtttttttttttttttactggaatcaaatcaaatgtataagttagaggaataaattacaacattaagtctcctaaactaggaacatagtattgttgatggaaaaaccaaattctgtaaaatatatatatattttttgagacggagtcttgctctgtcgcccttctgagccagtacgaatgaccatgacccagggaacagtcttaagagatcctgagaacaagcgcccaaggtgatcaggttacagttttgttttatacattttagggagacagaagttacaagcaaagacatggatcaatacatgtaaggtatacattggttcagcttaaaaaggtgggacgtctcaaagatgcttagaaaggcaaggagtggggatggtcacaggtcataggtggattcagagagattttctaattggcaatttgttgaaagagttcagctttgcctaaagatttgaagtcagtagaaagaaatgcttgagttaagataaggggattgtggaagccgaggctcttgttttgtagaggaagtctccagctagcagccttcagagagaatacatcgcaaatgtttcagaccttacaacgtgtcagactcttagttaatctttcctgaatccaggaaagtgctagctgcgttaatggagagtctctacagatgcaaatttcccccacaaagatagctttgcagagccatttaaaaatatttcaaagaaatatattttggagtaaaatatatttgatttcctttagagtctgctatctgtcatgtgatgcttaccagagtcaggttggaatttggtatctcattgctacacagtctgtttggtgatctctattttatgatctctattttaatgttaatgctggtctgttgtgtctaaactccaaaagaaaggcggtattacaaggtgtgtctgacctcccttccagccatgtccaggaattcagtttttcaggcatctctgaggtcctcttggcccagagagggttcatttggttagttggtggggattaggattttattttcagtttacgatatacacagtttaacttttatgcccttcaggaatattctaagttttccacatttatgttgttgttgacaaaaagattcaagctctgtaagacatttgaagatatttattctgagccaaatatgagtgaccaatggtccatgacatagccctcaggagatcctgagtgcatgtacccaaggtggtcagggcacagtggggttttatacactttagggagacatgagacatcaatcaatatgtgtaagacgtacatttgttttgtctgggaaggtgggacaacttgacctgggggcttccaggtcataggtagataagagataaaagtttgcattcttttatgtctttgatcagcctttcactgaatacacaatttacatgtgagaggcaggtagaggaataatcacttatgccttagtctgactcagtaaatctgaatttttacataaacaatagggcagaggaagcaaccagatatgcatttgtctcaggtgagcagagagatgacttagagttctgtctgtcctttgtcccacacctgtgggataagctatcaatttacattgccagggtaaaatgccacagaactgttttagggctctgagtccctaaagaaagatcttgaggcccataaggaatttcctggtgagcaaattgtgagggaggtatgtagtgttttttatctttttagctatcttatttaggaataaaatgggaggcaggtttgcctgacaccctttggcttagtgattttggggtcttgagatttatttttctttcacattgtgtacatttcttttaaatatatccctcagtactttatcattttagttgcaattgtgtatggaatattcttccattatgtcttctaacatgtttttcttcacagattaaggctatttatttatgtgtgttcatttcacatcccgtgtattcagcactaatgcccttcacggactatgtccagctctctgcctcccgcttgtgggcacatgggaggatgtagttcctgggccccgtgtttggagggagcctgtggctagttcttgccatggattgtaacagaggtgagatatcacctctggaccagagtatttgatttttgatgggagatgctcctggctttttatccttcttccacagtcataggcttatagtggctgctctataagcctgaatcctggaatgacaagctatgtcacagagttcagtcaacccatggtggatgtgtggaacaagcaaaaagtaaacctgtgttgttatgacctctaggatttggaggctgtttgttaccatgttatagtcactcctgctgtttatggtacgctctaggtaattgtggtgtcagtgtagtgtgtttcatggtagtttccactttataaagtttctgccttttaatttcctatgcagatattcatacctcttatatcttctgttttcatatgtactttggatttgttttaatcaggtatgcagatatggaaattattgttataaaggaagaagtttgttactcacaattccctggaagcagggtgtacaacataccacacagggctacatggggaagccctgtttctgtatttctgttttaggttggctacttgacttatttttcatttttatcattcctactgtgctatctgtagtctgttttctcttttctcccttataatttaacttcatttctaaaacagtttgactccttttcccccctgagtttaatcagtttctgtttcacagtcaggaggcagagtgagtaggaggaaaaccagagcaagagcctttgttgcagtttccatgggaaggattgggcagggcacggcaagcaggctaagctggttgagggttggctagtctgagtaattccagcaggcccaaagtggaggggctgtcctgagttatctggtacctggccctgggctgattagaggaggggaatattggcctgcagtgtaggaaaggctgtggttgaggggtctgggctttggattaatgggtttatatatgaaaggcaggcttgcagaaaagtagtttgtcatctctaggaatttgctagcccaaggagatgcagcttctcccaggtcacaaaggccccaagatgtcaaagcgtcataaaatacaaagaataaaaaacatgattaatatacttcattgccaattgaacagttttgccttataaagtggttttcctcatattacttaatgctttttggcctgaattctaccttgtttgatacaagatcataatctcagttttgttgttactgttgttttgtctttgtcttgtgtacctgataaactattatctatctgttttagttgtgacctttataaatcactttgctctaggtgtgtctcttatatacagcaaatgattcatctttctttttagagataatgtaaaaatccttttctttaaatagttgcattaagcctacttaaatttattgctctcacagatacggttggttttagttctgtcatagtttctatttttctgtgtaaatattttaaatgtctttcactatgttatcttagctttttattttagaatattttttctgatattttaaaaaactatgttaatggttacttttttaaccactagtataacaatacaattatgtttataactagtggttatataagtttgcctttatgtaatatcctatatccctttttctttagacaatatcagtttattccctatatgcctcaataaaacaagcttctatcttcttccttcattctcccctctctcttctaccatctaatttaaccaatagtatatcttttgtctgttcttattgtttgcccttctactattaaatatgcttacatatacatatttgacctgtcaactgtagttttgttttttttgttgttgttatgtttgagacggagtcttgctctgtcgcccaggctggcatgcagtggtgcaatctcagctcactgcaacctccacctcccaggttcaagcaatgcttgtacctcagccttctgagcagctgggactacaggcgtgtcccaccatgtccaggtaatttttgtatttttggtagagacagggtttcgccatgttggccaggctagtctcaaactcctgacctcaagtgatctgcctactttggcctcccaaagtactgggattacaggtgtgaaacactgcacctggcctgatctgtcaactgtaaacattatctttgcagtctcatgtataacagctgaggcattgcaaatttattctgctttctaaattctaccatttttgttgattgtgtcattttcattttgacagaatattgatattcttcttcatcacttgtatctctacctttgcttttccttagatgtgcagttaaataaacttactgctgcctgactgctcctttgccagactcttattcatctcttgattggctggagttcatcctctattaattttctcaaaaagtgtccatttgagaaatgttttctgaacgattcatgtttaaaatggtttgtctacagcctttatacagaaaagagtagactggatgggcataaagctttcttagctcatattgctttctttccttcagtatcttgtagatgtggccctattgtcttttggcattgactgttgctgccaagaagtatgttgctaacctgattttctttcttttttgcttacatatttaaaaaattctctttatctttaaaagaggataattttaaaatatgttggtattggctatactagaacagtttccttatatacagtgtgccctttaaatgtgtaaaatcaaatatttcaaaaagtttgcttttttaattaaagtctttaaattctttttttttcctttccattatttcaggttttttatttggggctcaaattatgagtatgttggatttttttacctatactcggtatctaacatttttctttaaccctgtgtttctttatttctgttttgtctactttacttttcatttttatcattcttactatgctatctgcagtctgttttctcttttctcccttataatttaacttcattcctaaaacagtttgactcctttttcccctgagtttagtcagtttctgtttcacctcctcctgtgagttcatgtatatctgatttatagtttttcttcagagctgtgatacttttgtactaaattaaagcagctcatccctctctgagtgccaaaatacatatgttaagtttaacttgaaatccactgcctcttaagacaatgaaaaaaaatcaaatgatttaggagtttaaggcataaacattttcagcagtaaactgtactagaggttgtagttcttaccatgaaatctgtgtctactagtaatccaataacttgctttttggtgataatcagaaattgaggcatcctggaagaaaaacttcacaggaagcttcctcagtctttgaattattttggttaaggtcttcttccatacagctatactgtcttgctgcttggaggaactattcctggaagaagaaacagagtaagcaaatacagaaagataggacaacaggaatacagtttgaagatctgcaggagaaaatgaatattttcagctgtgtgtattgctatccaaaataaattagaattctgaacatatagaattagataaggagactagaaattggatagtcagctaatatctcccatagtcaaatatttggctttaaaacttaggatgtaagttgtaactagaattaagcttattctcatagagatggaattaatcttcaaaggagggtataaattaagagaaaagaagagcaagaagaaaaattaggggaatccatgtgttttaagggcaggaagaggcaaaggaaacagtgaagggaccatagagtgtcccagggtgcagaagaggaagtgtgaaaatatccatgttagaattaggcttctactgccctcccatggactttatggcctcagtgtgtttgggagatggcattagtaacagttgaatgagaaactcacggagtatagataagtccgtgtatttgaatctcagctccgttgcttactagctggcttttaactctgagtgctggaagttaaacataaaacagaaacctataattaatgagaataatggtaactaccatgtattagtgctttccataaaggaagaactttacaaacactatctccttttctcatttaaccctcataagaattctcattagatggattgtgttatcctaattgtacaggaaggaatgcaaggccttgggtgatgaaatgatatattcaccatcagagaattagttagaaggtggaaccagggctcaaaaccaggccctagaacctgtgttcttgactgttcttctgggttgcattccttcatcagggacatgtagcctgtggctgccccagtcttccagcctcaggtttcaccatgggcctctgcgcctttccttctcatccttacttgatgtgacatctgttggggttcccagtaacttaaaatggaaaagatgagaagagagcttatttttatttgctccttaaaattaaggctaagtttttaattctttgatttctttttaaaattttttaatttttaattgttatggatacataatagttgtatgtattgatatatacatacatcaatatgtatattgatggggcagatgtgatattttgataccagcctacaatgtataatgatcaaatctggctaattgggatatccatcacctcaaacatgcatcatttcttttgtgttgggaacattccaaatctacatttctagttattttgaaatatacattaagttattgttaactatagttgcccaatcgtgctataggatgatgcctaactgaatcgggtgtagtgtgtgatactccttcctgccgttacaagcccactgactctcagagtcgggaatcagagtgcccacgctgcctccaactccccagtgtagctgtgcctagtgctgcgaagtgccagtccagcaccccgtgtcggggtgggagccctgctgagtgcgtacccacgctgggcacacctgcccagcctggcatcacacctggtgcagggcctgagctcagaagcctatctcccaccaaagctcactaacaagagaatccctcccaagcttctgcttcgctcatattaagcttaaaataaaaagtaaaactctgagcaaaagcccaaagaaactttgagaattatttcaattcatttttctttaattgatgctttgttcccctcagagagtaagctctacaacttgattttcaaagggggatgtgatgatcagggatgcagtgtttagatgtgtgtgtgtgtgtgtgtgtgtgtgtgtgtgtgtgtgtgtgtgtatgaacctaaaggctctgagactgtatatagtcacatattttagatggacgtcacttatgggtgtgaaattctgcttttagagtcatgcagagggccatttttcccctttgaaaaacaagaactactggtaaaaattcattagtttatgtcctaatgggaaacccttcttgtcacagttcttctctatgatgagaccgttattcatgcgttcgtattgtcacctcttgtcatttcttgtccacaggcaaaaactgggacctgacagccgctctgagcgactatgagcagctccgccaggtgcacacagccaatctgccacatgtgttcaatgaagggcggggtcccaagcagccagagcgagagccacagcccgggcacaaggtggagcgaccctgcctgcagaggcaggacgacattgcccaaggtaccgctgagggactgagcctaggcacagccgcccaggccagtgcaccgcagcttgcaggcgggttgcgtggtacaaagaatggtggggtcatcacctcccggatgcagacatattggcctctcagtgccttctttctcacactatgccgaaatgtcctttgttgcttctatccatggttccaacctctacctcagaaaagcagaaaaatgagtctgatttcctaggaccccaaaagcccaataagtgagtaaaagccagcattcctcctggagtcttggttttttcagaccaaacatctctagttctttcacatatttccaaagtaacacagtctccaagtctgttcagcatcacatttcttgtcccatgcgctccatcttctctatcctttttcttcattatgaaagtaagatatgcttattataacaaaggaaacaatacagagatatatgaggaaaacttaagagcattcgcctccacacctcccagatctcaccagtgtaatgacggctgataacattctggtggtctcctcctgctcctcttgctatattgttcaaaatcaaacacatcagagtcaaatgcacagcacactgcaaagtgcttgtttcactgagcaggagatgatgaacataatctctcaatagctacattttattctataatgtgttaatttttagatcactgctgtattcatggtgattctgtttttgcttgggtttttgtcgttgttattatttgttaattgccactgaaagcaatgctgaaagaaacatctttatacctctaatcttacatactggtgcttttgtttctatgggtttgcattcccagaatggatttgctgtgccaacacatgtgtgtttctagcttaataattttagggcttctttcctaatatattgctactcaccatgtgtgaaaccgggtgtttcccttcaatcttgccagcactggaaattacaatgtatggtgtgctgggccattctttcactgctgtaaagaaatacctaaggttgggtaatttattttaaaaagaggatttcttggctcgtggttctgcaggctttacaggaagtatggtgctggcatctgctcagcttctggggaggcctcaggaagcttacaatcatgcagaaggcaaagggggaacaggcacttcacatggccagggtaggagcaggagagagtgagttggaaggcagaggtgctgcatacttttaaatgatcagatctcatgtgaactcagaatgagagctcacttatcaccaaggggttggcccgagccattcatgagggatctgcccccgtgatccaaacacctcccactaggccttacctccaagatggcggattgcatttcaatatgagatttgggtggtgacaaatatccaaactatatcaatccactcctgggccctcccaaatctcatgtccttctcattgcaaaatacaatcatgccttcccaacagtccctcaaagtcttgacttgttccagcattaactcaaaagtccaaactcttgtctgagtcaaggcaagtcccttccacctgtgagcctgtaaaatcaaaaacaagttattcactcccaagatacaatcgggtaaacattcccattccaaaagggagacattggccaaaagaaaggggctccaggcctcacacaagttcaaaacccagcaggacaatcattaaaccttaaagttccaaaataatctcctttgactccatgtctcacatccagggcacaccagtgcaagaggtggactcccaagaccttgggcagctctgcccctgtggctttccagagttcagcccccatggctgctctctgctttcagcttttccaggtgcagggtgcaagccactggtagatctaccattctggagtctggaaggtggtggcccccttctcacggctttactaggcagtgcccccatgaggactctgtgtggggcctccaacctcacatttccccttggcactgccctagtagacgttgtgtgtgagggctatgcccctgctgcaggcttctgcctggacacccaggcttttccatacatcctctgaaatctaggcagaggttgccaaacctcattcactcttgcattctacatgtctacaggtttaacaccatgtgaaagtcaccaaggcttatggcttgcaccctctgaagcagcagcctgaactgtatctgggaccttttgagccaaggctggagctggagcagccaggatgtggggagcagtgtcccaaggctacacaaggtagcggggccctgggcctggcccatgaaaccattctttccaactaggcctgtaggcctttgatgggaggggctgctgtgaaggtctctgaaatgccttcaaggctttttctccattgtcttaggtaatagcactcatttagcttccttttcgtcatgcaaatatctctagcaagtagttgctcctcaggctgcttgaattcttctgaaaaagctttttctttctttgccacatggctaggctgcaaatttttcaaacttttacattctgcttcccttttacattctgcttcccttaaatataagttccaactcctatctttgctgcagcatctgaatgcagactgttagaagcagccatgccacctcttgaatactttgctgcttataaatttcttctaccacataccctaaatcatcaagttcagacttccacagatccctagggtatgaacagaatgcagctgagctctttgctaaggcaaaacacgtgaccatttgctccagtccccaataatttcttcatatccatctaagacctcctcagccttgactctgttgtccatttcattatccgtattttggtcataaccatttaaccagtccctaagaagttccaaactttccctcacttgctgtcttcttctgaatcctccagacttccaacttctgcccattacccagttccaaagttgctttcacattttcaggtacccccttggtactgattttctgtgttagccctttcttgcattgctatgaagaaatatctgaggctgggtaatttataaagaaaagaggtttacttggctcatggttctgcaggctttataggaagcatggtgccggcatctgctcagcttctggggaggcctcaggaagcttaaaatcatggcaggcctcaggaagcttaaaatcccaaagagggaacaggcactttacatggccagagctggagcaagagagagagagtggtgggtgggaggtgccacacacttttaaatgaccagattgcgtgtgaactgagcaagagctcacttatcaccaaggggatagtccaagacattcatgagggatctgcttctaatccacacacctcccaccagaccccccctccaagattggggatcacatttcaacttgagatttggagacaaatattcaaactacatcaaatgtgtttatgttgtttttctactctgaagagtggaaaatggtgtcttgtctcatcttgtcatttgcttcttaggccattggatttcccctttgtaacgtggctgttcgcatactttgtccatttttctattgattggtttgtcttttcttatcaatttgttgctctctttgtaataaagactaaaacatatatttcctctatatgtatatgtgtttttcccacatatcacttgccttatgactttcttttcagaatattttcccatacacaatgtttacattatcttgttctcatggctgatgagctttctctctcactttggaaggtttcttggactacagaattactgaaatatattcttttttttttttttttcttttgagatggagtctcactctgtcgcccaggctggagtgcagtggcgcaatctcggctcactgcaagctctgcctcatgggttcacaccattctcctgcttcagcctcccgagtaactgggacacaggcacccgccaccacgcctagctaattttttgtatttttagtagagacaaggtttcaccgtgttagccaggatggtctcgatctcctgaccttgtgatccacctacctcggcctcccaaagtgctgggattacaggcgtgagccaccgtgcccggcctgaaatatattcttatatttaatttaaattttgttctttgagtcttttcatcaatttgaaatttttgtaaatagcaaagaatctggttttgctttctcctggattgagagagagttattcaagtacattttcccactgaactaaatgccagctttgccttatattaaattctcaacatacctggacctatttccataccttgttctgcccacccctgtggctgcccccctgttacacttgactcagtggtttcacagggtctcaccctcaccttctattgctatgcttttcctttttttgtgtgtgctgtttttgaatatttattttgccatctaaaccttaaaattataattctgagtggaattggaatggatttttatttaattttaaaaataatttgcatttataatattgttcttctatccaagaacattatgtatgcctctccacatattcagattctgttcagattttaagcatggaaaaaagaaactcattttttacttatttatcttttatccagtgaactacataaattctcttattagtcatttgcttaatgactaagagaatcacttggatatctaagtatacaatagtatcatctgaaataattgtaagttcttcttcatatttatacaattaattcagttttttattttattgaattaggtagactctcctgaactgttgcaaatgaatgctgtctttgtttctattagctcagcctattattcaagctatattgaatctatatcttggattattctcaactgtttattctgttgtttagaaaagccataattgagttagaaattttaatacatattatctgtgtcttctctgagtttcatcctttctgctgtatttgttttgatgctatcttgttaggtatatgtatattcataattttttagattatcttcctcgtgtgttttttgaccaatatataggctgtctctttgtcaagccatttgatataatggtttttatcttgaaatctgcttttgttgatattaaacagctaccctggctttctgttggttcatatttgccagaaatatcattttttctgctgatataatttcaacttttccatatcctttcatgttaaatgtgattcttgtagacaatttattattaggtttcattttattatccaatccaagaatctctgtcttttgagtggttaattcaatccattcttctgtcctatcttctctatctagttaaatttttctactggtttgcaagttacacattctacttttactcacattgcaattactgctattctattaaaatcattattttggttttcttcctattatttttaaaaacttaacaactatattttcccctgcaaaatacatgtattaatatgattttatgttgttctgtcctgcctctacttgctctcaatcttatttagatactttttgttgcctttgcttatttagataacaattaactcctttatttattcacatgtattcttttctcttttgctaaaaaaaaaaaaaccttcctcaaagactacttccaaaaacagtttttgcatggtgaatctcctaaggccttgagtgcctaaaaagatttacatggtatacttaaattttcatttagtagattaaaaactctagattgaaattattttctttgaacaccttccaacccttcctccatcatgttcttgcaccttgttctcatgtcttctaagagattcacttgacctgatgttttcacatccctatttattctgcacatgaatgcattattagtcccattaacattttttttaatcccaagttaattctttgtctttattattgttattattattttgcattctgatattctatttatctctttgcatgtatttactaggctcattttttaatctagtcctcctggccagtactttgttgcctttctttaacagtttccctgaagctcctggggcacgcagttatcatccatcttcactgtgctggagcacaggctctggtggatgctcctccagatgagagtcggggaagggtactcaagctggagagccttagatgttgtcatttgggctctagaagttccctgcctgttcccctctgcatagctggattgtctactgagggctgctcccagctcctctcttctagaaagtccttgtttcctgtagggactgccctgctctggtgtaaccgccaagctccccagtgtgttagggaaaggagggaagcagtgcttatggtgactggtgccccacccagctgtgctccagcaccacctgacattctccagctggcacagggctggggctaggggatgatagggaaggcaggccatgctggagccatgctggggagaggaaaggcaggaccaagacgccctaccccaggccctctctgtcggcctcacccattcccacctcctgcccctgaggatttctaggtgtgtgtgaggacaggacactgaggctatgcactgtcttgcccctcttgctgattattcttaaattcggtttcatttctgccattagacctgactccagaggaaccaccccttccagtccttggctcggtcttgtgctcagggccttccttgactacaccacacggttaaggctgctggtatctttcaggcagcagcaatccagacagatggccacatggcagtcctgctcttttgagctggcagcaaacaaaccaacccattatcttatcctcctggtacaggggctagaaggacccttctctctgctaccagagagattggcagaatcagggcctagtaagtgtagctgttacatactgtgatctgacttttcttagatatcatttaagaaaaaaaaaataggactctatcccagcataatcctattaattgagccttgcgagcaatcatatcgattcctattgaattacagagtttctgaattaaatttatgtctcctttagttgagttcttcctgaaaccatagtgtgccaaaatggaaaatggaacatttcatattctaaatcagggcccagaaaaagacctgtgagcccaatctgggctgttttttaagtaaagttttattggaacacccccacgctcactcatgtatgtactgtcttcgacggctttagtgctgcaaagacagaggtgagtagttgagactgcatggcccacaaagcctaaaatatttctgtctcaccctttaggaaaagttttgtccacctgttttaaaatatacccaggatcggttttaatcaggtgtcataagacacgcagacacagaaatgactgtcatgaaggtggaagttgttttttttttttaactcacagttccttggaaacaggaggcccagcacagcatgcagggccacacggggaggcgccggtcatctggagataggagtgaggggaagcatgggccaaagcctttgaggtggtttctatgggaaggcagggcagggggagcagccccctaccccagctagtgtgcataacggcagccagctcagaggcaccaggtaccaggtaccagggcctgtctccggctgcctggtccctggcctgaagtgcttagggcaaaggaacgttgcctcctggagagtaagagccagctggagagggtagtcaggagtgtagattctggattggctgctccgcataggagaggtgtgctgcggggcaaggcctttgccatctcttaacattggctcacctgggaggggcagcctctccccagtcagggaggtcccaggtgccagagccacaaaaacaaagaaaataagaaaacgcagggccagatgcagtgactcattcctgtaatcctcgctgagcccaagtgttcaagaccagacagggcaacatggcaagaccccatctctgtaaaaattaaaaataaaaggaaaataaatgaaaaaagaatatatagttaatacatctcccctttgtcagtggcagggaaattctgtacattcttgtactatgttttgttttgttttctaatctttctgtatttttctgagacataactttgatcatggtaattcctgtaaaacattttatttatacatccaaaagtagaatcactgagttcacgtttaaagaatcagtgtgtgaatgtgtgtgtgtgtgtgtgactctgtgtgtgtgtgagagagatgatatgtgtgcattcctggggtgtcacaggaaatgttagaattaggagcatatatttctcattttatatgatcttcaacgcaatctattaatatttttagttcaaaaatacttttttccctcaaactccaaatatttcatgtttagaactgcagaaccacatcatgttgtcctaggaatcaccgtgtttccaaggccatcgaagtgtctcatgtgggtgctgattgatgggcccgggaggagcatgggtgcccctggacaacaggtgcccactgttgagagcagccttgagattgtctgtcccaccgattgcaggtgcacatagcacctcgattctctaatgcctgatgtccctctccatcagattccgaaaaatggggcagttccttctttcccagatacaaaaatggtagtttgtggcaagatgagtggcctcagcatggcttgcacgaggcagaaagacacaagcctccactgctcctgcactcaaggacctgaaccagcgtgggaagcaatgggccgtcccccaccacccaagctgggcccatgtgctccctccctcttctttctaatgtcctgtgtggtttaacttctctttttacctttctgcaaaatacaaagaacttaatcctgttggtctctgaatgaaattgaaggtgaatctaaaccacccattgcgaaatgtagtctgtctctgtgactctgtattcattttaatgggaaaaatacatgaaccttctggaaattagcttcggatttaaaactaacttgccataggatcaaaagcttatgctttttagtctgttgtaacaaaactccatgaatgccatttctgtccagtgctcttgcaagtggggaaggaaaatgctgctgttccgggtgaaagctggggctgggttttccgtgtgaccgtggtgtgctggtcagtgtggacctcagaggggcattgcaggagcacagacctcaccagtgggcaggctgaactggaggacagtgggattccttgggacctcagggaatagcctcaggaatttgccacagggcttagacaatgcttatttatacttaatttaggcaacacaggcagcaggcttttgaataaaacaccagagaccatgctttcctgagaaaaatgaaagatctactgccctgctaaaaagacttctccttactgaaaacactatgagaaaagataacctattcttaacatatatttaagcattcttgttttatgttcaatgttagtcattagaacacagggcttataaaaacaagcgtgcttttgcagcatcaagaagatacatctactttctaggtaatcgacttcctaacatggtaacatattgtaccttagagaaatcctacactgcgtttctcattccctggctgaaaagcccaagaagaataaagccagaggagagcattatttttgagagtgctgtggcaaaagaatatccagacagaagagaaacacatggactgacttaatattgtgtgtcctgggagggccatgtaggaggcatttatcagcgtaactttagtaaaacaacctgtcttaaaacctgagctgctgtggatgcctgaatgattgtttctttgcattaagtgcataaatgcatcgagacaaagagcggtctcccttgtaccatttagtcctgggagaggacaactcagtggaattgaggtagatgtaacttcagacccaagagcaagcctggtgctctttgacagtgctgatgtgcagttgtactgtgggcttgcagctccccacttactaagtggtttcatgactcttgtgaataagtgccacataccaggtggtggtgattaatccagcagcaggaaggcctgcaggatagaaaaggcttgtaggatataagggctgttgcagagagaatatgggtgtgcatgtgtatgtgtgtgcacacatgtatgtgtacgtgtgtatgcatatagtctgtgcatgtatgtacatgtatgtgcgctgtgtgtcctgtgtatttgtgtgtgcaaatacatctatatgtgtacacgtatatagtatgtgtatagtctgtagtgtatgtgcgtgggcatgtatatatgtgtgtagtatatgtgccaactgtttctatgtgtgtgtctgcatgcatgtatgtgtatgctatgtagtgtgtgcacatgtatgtatacaagtggatgtgcagtgtatatgtgtctagtgtgtgcatgcatatgatcctgtgtatgctttcgtattcatgtgtgagcatttatgtgtgtgcatgtgtgtgtatgcgtatgtgtgcagtatgtgtatgcacatgtatatctctgcttataagtgtgtgtgcacatgtatatgtatgtgcgcatgtgccatgtagtatatatgtgtgaacatgtatggtgtgttcatatgtgtgcacatatgtatttttgtgtgttgtgtggtatgtgcatgtgtgtggtctgtgtgcatgaatgtgtacctgtgtgtgtgtattgtgtgtgcatagtatgtgtgtttatgtacatagagccacacctacacccactcagcccttggggctatctttccttctccccctgcagaaaagcggctttcccgggggatttcccacgccagctcagccatcgtctccctggcccggtcccacgtggcaagtgaatgcaacaacgagcagttccccctggagatgccaatctacacattccagttgccagacctgagcgtgtacagcgaggatttcaggagcttcatcgagcgggacttgatcgagcaggcaacaatggtggctttggagcaggcaggtgagttgcccctgccagcaggcccaccctctttaggcttggtgaatggtgagctggcctaacctactctatgagcaagagaagggcacatgttctcagactctgggcagttttcagttaggattctagatgctgcaccgcacctcctgctctacgggccgacagtgttctagccagcatgggctggatggaggggccgataactaggtggtgctgaaatctctcgagttttccccttgctcctaaatcccagtcctcctttaaggagaactctatgcttctttgccttgcttctctctttccccagacaactcctccgtgggtgttgaatgaaagataggaaagaccatgggctttagagaaaacgggagacccgccacttcctgtggacttgggcaagtcaggtgatctctctcagcctcagtttctccatctgcaaagatgaggagactgctgacccggcaacgctttggggtactaagtgacatgtgctttccatagctgtccattccctgcctgcgcagcctcttccagcttccaggttaaggaagcacaaaacctgacctcagtctccttccttctccttagtgtttcctcaccaccctaacatcccaatgaagaaagcgttcaagaagcaagacaaactctcttctttggaatgtttaaggagaaaataatgagtccaaaacaaatgtctaaaacagatttaggttcttcctgagacaaagcaatgccagtttcactcataatcattcacattataaacattgcaaaatcacatatctgggggtttctcaggcacgcatgtggaagatgttatggctgtctcctcaggcccaccacgcccctcccagtgggagccccgcctgcctgcacgggctgacagtgcacatggagcatgtcctcagccagtgggaagccctgctcctgctggggtggggaagcatcgccttccagtgctgacccagccttcagccagctcttcatgtccactgtggagtggagcctccacttccaaggcttggtccgtggagacgtccccagatgtgtcatcccaggagtttagggctgcagccagcaatgcactgttagggagtagagcttttctcggtgctcggcgaagacccaataaaattaccaagcactttctagagttccagaagaagacaggagagaagtacctgtaggttggtatgattctgatattggtggatggaccaatcaggaccctggtaggaaagaaaaggcagcacaaaactgtgagataaaggactccataaagggactgctttccaaggagtgggcaggatttaaggacactagtgaaggatactaccgttcctgggactaccctcaggcctggcaaaaagacaagggatgagagtggctgatggagatagccacgggcagtaggtgtggcatccgggagagagaagatgctggggaaataaatactctgaccacactcttcctccaccatccaggttctgaccagtgcctcttaatggcagaagggcagattgcggggagctcactgatgtggtccacgcaggtcaccctctgcatacagagcagcatggagaaggatagacggtagatctgtggggccaatgggaaacatccagaaagtcaatgtgccgggaagttttaccagacctggcttctgtgtacacgtgtacacctgctttcatgccattgcttgtcattgtttgcccagggctgtcgtcatccaccactttcaagagggaaggcacaagatgcgtttagacaaaggacgagatgtgcctagtggggcttatttgtgttgggcaggcttgcagtcaggtcgtagccacaggactcatagaagcctcaccaatggcatgcttgacattagaacaggctctacattcccaacagctggatctcatgttgtgactgtggagaaattctcatctcagctgcttcgcagccatcaagagcaatccaatgactggcacccacagccttgctctgtcttacctcagcaagactcaacaaacaaaacaattcagctagattagcaataatctaaaccactcactgtgggggctggctattttaaagacgcttctatatgactaattcagataagatattttcaatagaaaaagctcactattcatagagaagcggaaattagtatttgttaagaaagaaacaagtttcatgggttactctctgttgaatgctacggcggtgtagacctttatacagctcagcactgacgattgctaatagcttgggtgatcatagcagctgcctgagtgctgtgtttcgtgtgaagcacagtctcatgcaaggttgtaggtagaccccaccatgttaccttctccttgagccctaccatgcttagcaaaagccttcacttcttttgaacgtcttttctgttatttttttccatattttgcattttaatttttatcacttatattttaccttccagactagcattttaagatgggactctggcttcatccagtcttgaaaaataccttttaaaaacccaaacttagtgagttaagatgttaaattatgaatagctcattgtttatgttgggcaccacgaagagaaccaactggaagcagagatcagtgaaggcaggaagctcaggctcccacccagtggtggagaagccatctggtctacactcgcaggaggccttgaggaagtgggtctcactcttcagggagtggtcaaaggtgcttgtggtgcaattcgcgcctgaagatcagggatctgcctgggacaggagtcctagtagccaacatgtcttcctcgtccctcacgctgaaaaataataaaagtggccaaacgcgatggctcacgcctataatcctagcactttgggaggccaaggcaggagaatcacttgagctcagaagtccgagaccagcttgagcaacatagtaagaccccatctctacaaataataaacaaattagccaagcatggtggtgcacgcctgtggtcccagctactcaggaggctgaggtgggagaattgcttgagtccgggcagtcagggctgcagtgagccatgatcacaccactgcactccagcctgggtaacaaaaccctgtctcaaaaaaaaaaaaaagaaaaagaacagaggtacgcagacaactgtgtgtgtgctccctcagaggagtgaagcagtctctgggctgggtgatagcatgaacctgacccctgcccaccatccatctgactcctccgaactcctttcctctgctctcaagcgaggtcttagactaggtcatttctcagtgccctgctatgctcagactcacgtgaagaccctcagccggccagtgctaaagggtctcccacagcccatctgggtgaggagtttggtcactggaaagcactggcagctcctgtaccttccaccccacagccaggctctgctcccgtggcccccactgtcacagtccacttttccatcatgaagtggccatccaagaaagctgctcagtattgctgggtacaaagggtaaatgcctcttcctaatagcttagtgcttagaatctttatgaataaactatttatatgcaatattattttactgaatacatgagagattgaaatacagatgtcaaaaaattatttagtaaaaaaaaaatccatttgtttaagggacagttctagctgtgcttggcaggaaacattatttctgtcataagactttgggtggaggacttccttttcccttggacagaacatgaacccagggctcaggtggttctgaaaactggcaaacagtggccttcactcagttaacattgcccaccatccagctgtccatcctggggcctgattccactctcctggggccctgcgtggtatctgcctggcctcccgagccacataggcagccccgtctatttttgaggcctctgtgtcaagtggggtgccagtctgaactcccataaaacccacagatctgggagactggtcttccccaagtcttcaaaccctggaaaacacaacccactcccacctcatgacagtctcagggcaacagaagggccggatcatctgggcctaaaaccagctgacctcctgagaggaagggaaacacctttcgttctttaatgactagcctgccattgagaaggcaagaaaccactccttttgccatcagctgatcctgctgcatttacacaggagatggctcggagaccggggtctctgggttgggaagtatcatctgctgcctgtggcagcagctaaccaccatgtgggtgagatggtgtggttcttcagtgtgtctgggggcagagggcagaggcatttttgtgtaatgcaggagtcactgcatacatgggagatggaaacgcatgttgaaaaatctctaggcacacctttgagttgtgctccaggggaggataattggattgaggggaatctgccagagaatggtaagttacagaggaggcttgtgggcttctgagtcagcccgaccctggcttgaggcccggattggcagggggagcttggccacgtcacttggccggctggagcctcacttccttccctctgaaagtcagagatgtgtaacggcggccaaatggagacagattgacccagtgtcagcctgtgttgaatgcccacgaaatgccccatccaggtctggggctacctccacactccaggcagatgaaacccctgccctcagggaggtgaaattccagtggaagaaagccgatgaacaaggggagcatgaaaatgaagtggggcctcagaggctactctggggaggttaggaaggagagggaatcccgggatgccgctggagggcagggagggaggcagcaacagacacctgcgggcctggctttcctggcagagggagtctaacatcaaagtcttggcatatttaaggaagccagtgtcacctgagctggtggagcgagggtgagaggatttggaaaggagggcaggagaatgggagccgggcgctagggagcctcgtcctttaggcttcactgaaggtagataagcagcccctggagggttttgagccgggggctgacgcgtcttgattcacatctgacagattctggctgctggagaatggactatggggtggtaagagaagaagctggaagagcagggagaggcagttgctccagaccagggcagagagagacggctggcagggtcgtgggggtggtagtgcaggtgaggggcagtagagagacacggctatggggtacgttttgaaggcagacctacaggccttgatgatggagggctggggctctggcaggcagggaagagtccagcatggccctaagaatgttaccctgaatatgggggtagataatgttgcctgaggagatgcagacccctggaggaagggcaagaagaagaggccagcactgtcaggcaaagcccgagactgtagtgagacttgtaaagttgctgcccagatgaacatgagggtctggagtcagagagagccctgcgttggggatgcagatgtggagttagtgccctaaagtgaaacccgtgggatcccggagtgagctcctcgtaggaccctcccaccatgcccccaacctggctccatgcagtggtgagcatgagttggacacacttgtctggagcatggacagaaaacaagctttccaaagactcaggctggggccctacagtattgagggctgaggaacagaagaaggagccagcagaagagactgggaatgtgcgggcctgggaatcagggcgaaccagcggtggatagtgaccctgacgcccagggtggaaggtgtttcaagaagggagcaatcagtggtgccaaatatgccagtaagtcagtgtgcactagaaactgaccgctgggtttgactgtgagggcaaggttctcgggaagccatgctgcactgtgcttgatacagagaaaggtcaggaagtggcttccattccccttctccttatagctctcaccatcggctgctgtgagtcatctctttcctccagctacttttacactcccttgccttccatctcgtgaggcttccattggcctcctagctacctgggaccattccttgcttccaaaggcagctcctcccatggccagttgccaagtttgccttcccatccttgctgtgctttggagcttcctccacccatcagtcaggcagagtcgcggctgcgactctgggcaagcctggaaataccacgttcctttgtgggccaggtgcagcgttgggcaaccctgggcatagggcctgggccagagtgtgggagagacagaggccagggttcacatctcctcagcgtagtggtcacagtgtggttcctgtgcagccccctgagggggcgtcaggctctcctctgtgacgtcgtgatgaagcagcccaccttgtggggctgttgtgaagatgaactgaggtcgtgtgtgcacagggctggatgcatactcagcatcaagtaaatggcctcctctactaattttttattttcatagagtggtatttcctatttttctttcttcacactttttgctataaagaatttaaattgtgaccaaatactaagttatcttctccagcattacaattattcattagtaaacattgagcacctgtggtgtctcaaatcctattgtcatagcccatttgcattgctttaaagggatacctgagaccaggtaatttataaagaaaagaggcttatttggctcacagttctgcaggctgtacaagaagcatggggccagcatctgcttctggtgaaggcttcaggaagcttccagtcctggcagaaggggaaggggaagcagatgtatcatatgatgtgaaggggagcaagagaggaggtgccagactctttttaacaatcatctcatgggaaccaatagaacaagaactcactcattactgcgaggatggcaccctgccattcatgacgaatccacccccatgacccaaacacctcccaccaggcccccctcaacattggggatcacatttcaacatagatttggaggggacaaacatctcaaactatatcaactaccaggattattggggacaaccaagatgaggaacacaaggcccctgccccagaggagcaaaggacatgaaggcaataccgcagtcccatggcaggagctctcacagaagcacgtgcaaagcacagtgatgcccagagaggggacatccgagggcccaggtggggagggagcactccagtgatattaaaaggagttacagtgtcacatttagggcaagaatcccctcatctttctgatagagaattgtcacgttttgttttctttcatcaaaatgtcgtggggtgatgagcaaaaagacatcttattttaaagtgtgtggtaaccacctgctccaaagctgaagttaattggtcccattatcacggatgaatcagaggactattgctcagaaaagtcagaataagtgactaatagctccccacgtgtgaaaccacctgcctctctcaatggtgttcacctgtgattttcttatttgcagaacctcaagttttcaagctattcacaatgccagtgcccgtgtcttgttcctgttctgtggttatgtcatggggagttgggaatgaccactctgtcaaagccaggaatagaaacatgaaaccatgaaactttgcatgttcccaatcgcactccttgtatggagcacacctttatctcgggcaccacattctaggttctgctggatgttagaatagcactgggccatgatggggtctccggaggctggaaagtgctggcatttaccatggctgggccatcttttcagggcggtcacgtctgatgtacagccctaggagtgctctcaactgagtaagagtcttaacttctagaagctggcttacatcaaaccactaagccttgccctccatccacacagctgctctagcaggctgcatcctgcctacctgccctctcccaggtgtgcacagtctcaacagcctgggccacactgttatctgcacaggttacaggagctgtctgcttgcccttgagcattcaggtgtttctctgtgcatagctcccgttagcagcatgcacttcagggacacgagtaaacctcccagacacctgctgaacactcccaggatacgcctcccaggatacacatgtgaaatgaatggacagaattcctatttaaatatccttgggctaaaggacgctgtatgcatttctatttctgcctaacaaattaccacacatttggcagcttaaaacagcacaagtgtatcatcccacagcttccgggggccagccgtctgctgtgctttagctgggtctgagactctgctcatagtctctcaaggctgaaattaaggtgtcccctggctgtgtgctcatctaggggcagatccataagttccctgcggttggcagaatttagttccttgcagctgaatgactgaggttccattttcttgctaactgttggtgcctagagagtacccaagagactcaggagtgatgcaggttcactgtgcgctgcttccttgccaagtctcatgcatgtgtacaggttgcacaaagcaggtgtcttacagacaggcagtgagggacaatagcagcctagggttcagggtaagacagtcacacaagagttaggacagtgcccagggtgcatgctgtcttgtgctgcagctgagggaccccagaaagcagcctgctgtgggtttgatacctgggggatacagtcattattgggctaaaacattgaaatacatcctgttctcggagggaccagaacagagtccagactggtccagctagtttcccgtgatctcaggatactgcattcccagcacattcttttttttttttttttcctggagacagggtctccctctgttgcccaggctggagtgcagtggcacgatctcggctcagtgcaacctccaccttctgggttcaagcgattctcctgcctcagcctcccaagtagccagaactacaggtgcccaccaccaaacccagctaatttttgtattttagtagagtattttgtatgtagtagcatgttgcctacagtaatgcttgagaactacaggaaaggggaaagaacggggtcagtccaaagccatccaggaccccacaccacatccttgccgtctagctctcttcttatggcatggcagtgaagttgtttactgctttgggttgtttactgtttggcatggcagttgtttactgcttcaagaccagccagagaatctctcctctctccccctttccctcttccctcttccgtattccctttatattctaccatctgccctttctctgtaaatctctctgactttccttttctctgaccactaaaccctcttttggtcctcagattaggtcaggccaacccaggataatctcccttttgatcaactcagagtcagtgaatagtaaagtaattacatctgcaaaatcccctcactttaccccatattataacctaatcacaggagtgacatcccgtcggagtcacaggttccacctacacccaagggaaagggatgacacaggagtacaccccaggaggtgggaatctgaggaccactttagaattctgcctgccacagatacagtgtcattacttgcagtatgataattcttctatgctaaaagatccagaatgagagattaaatcatactgaatatgttgtggtcaggggaatttttttgatttcctgatgtgccacttttaaccatttcacttggattggtatgttacagcacactgtgcctagaggcaggcatgcatttggactgaattctacttttttttttttttttttttttgagacaaggcctcgctctgtctcccaggctggagtgcagtggcacgatgtcagctcactccagcctgtgtctcccgggttcaagcgattctcctgccttagcctcccaagtagctggaattataggcatgcaccaccatacctggctaatttttatatttttggtagagatggggttttgccatgttggtcagtctggtcttgaacccctggcctcaagtgatccacccacctcagcctcccaaagtgctgggattataggcatgagccactgtgtccagccagaattctactcttgatggcttcaaatttcaaacagcttgtctctgagccctccaaagatatcataccctttgattgggctcttttgacaatcagaaccatggatgtggtcatctgggataggatggggtgggcactatggcaactatgcttttgataatagcagccttcacgtattggggatctcctatgtgctaggtgtattatacgccattttaattatgtccagatctcacatcggctgcatgcaattgccaagatgctcttcattttacagaacaggcagaagagacttggggaagccgaagggtttgcccatggctgcctggctgtgaaatgtcctcatcctgcccatgccacgagacctcctcagttcagctcagagcgttgggaactgtcatcctttccctcaggatactttctgccacgtgacccattccaaatatgaattgcatgatttattggattttcttaaaagaataaatcaccaataccagagaaaatctccaaaggaacactctttgagaggccaagtagaaagccagcagccgagttacacaattctagagggacacgttgctgagggcaccgcgcaggaacatctgacagaggcaaagtgaaggggggtggcccagggcgcccacagatgatgggggtggcccgggaggcccacaaatcacggcagtccccaagctttacatttaacactcctcacacagagtgactgatccccaagtcctgtcaggaagaaaatcaaatgaagttatcaaatttttaggagtatatggtacgtacagaagaacagttcacaagcccaggagacttcagaccaagcgtggcaagaagcctaccttgcggcagttccagcacagctgagaaagcgtaaaggaggaagcattttgaccatttttgtgactgactgttacacattaaccttctttttagggcaaacagagttagtttaagctgatttgtctacagctggttcactgaatcatgtggactagccaatgttttgtgttttgtttatgattagagctaatatctcggggaaatcaggatgacttaagttttggctacatggttataggtggttggccttggggtgtgtctgaactggggcctctatttttctttaacagtcctgtaaaatgcagggatacataatgttactgatgagctattacccaccaagactgaagtttggaagcaagtcatgtgatgaatctgctgtaacagagctcgtaagatcaaaaaatattcattaagtcactattgcattgtcattatgttctcacttttatttttgtgaggaagaaatagaaatctgtttgttaatctaggtattggaaatgaaaagcatgtgttcaggtgggagttaaggaagggttagaaaatagaacctttagatgtcttaagaagtggtaaaataaaactggcagtgtatcagatccatgagaagccagcctgttcaacaattctgggtaaaaataagaaacatgtgatgttaaagcatatattaatgacaatatgtagtcacagttttatgttgtagccttgtttatagactcagtcagcatctaaggtaccccttaaatatttcagacatactcttttgcattttatggaaaaaataaaatgaggtgaaaatatttgcaaattggggttttctgaagacattccatccagcagattcaccacctgaatcctttctttgccttcaaaatgtcatctcaggttcaagcagcttccagctgtcttttctcttagagtcatctctggagctagacccattaccctttcattgttttaattccttattgaaatgtacatgtgggaaagtgtgcaaatcataagtgtagaacagatcacatcctataacaaggactcagacaagaaactcacatcaagaaaagtgacttcttatagcataggtttattttgcctctttttgagctttatataaatggaatcatgaatgggttaagttctggattcttctgcttatcattaagcttatgcaattcattcatagagttgtgtaattaccatatagcttatttattctcattggtgtattgcactgcaatgtatatacatgtattacaaataacttctccattatgttattgatggattttttggtgtcttagctcaggctaacataacaaaataccatagaccaagtgatttaaatgacagaaatttattttctcacagttctagaggctagaagtcccagatcaaggtgctggccaattcagttcctggtgaggattctctttctatcttgtaaacggctgccttctcactgtattctcacatggtctttcttcagtgcatgccttggggtgggggacagtttgagagttgaagctctctagagtcttttatacaaacactaattctgggagatcagggccccacccttataacctcatttaatgaatttaaattacttccttgaagtcttcgtcttcatatatagccacactggtgattaagatttcaatatgtgaatttggaggggacacattcagtccataacaagctgttgcaactttgtcattattataataaaagtggggtgctatgaacattcttgtacaggtttctggtaagccatgaacacatttctaaagatatatacagtcatccctcagtatccatagggaatttgttccaggaccctccagatactgaaattctcagatgttcgagttccttgtagaaaatggtgtgctatttgcatataacctactcacattttcccatatattttaaatcatctctagattacctgtaatacctaacacaatgcctacatcatttcatccatgtggatttgacatactatttggcacacagcaaattcaagatttactctttggaactttatggaatttttttttctggattatttctatcagcagttggttgaattcgcagattcagaacccacagataacagagggtcaattgtacttaggagtgatattgctggatcataggatttacatatgttcagcattataacagttgtccaaatagttttccagagtggatgtaccagttgctcttcctctgttgagagttctggttgctccatgttttttgtctttttgttttagttactgtgttggaagtgtaggagtatccacacagtggttttaatttttattttctgatgactagtaaaattaggtacttttcatgttattggccatttgcatatcctcttttgttgggtgccttttcaggttttttacccatttttaagattgcctttttgattgacttgtgggaattatttatacattctagatatgggacctttgtcaggtgtgtattgccaatatcttcacccaccctactggttcccttttcactcactgactgatacactttgatgaacagaagatcatgactaaaatagttcaacttaccttttttttccccttacttgagagcctctatttcagcttaagaaacctttgcctaccccaaggtcctgaaaatattctcctgcctttcatacttaaatctataatccacctaaaagtgattttcataaatgatgtgctatgtaatgaaagtccattttcccatatattcatcaacctgacatggtaccatttattgaaatcatcttttctttattatgctgcagtgtaaccttgagatacagcaggtgactgtgtaggtgtgggtctgattctgggtctgttctgttccatcaacaattttgatgttattcttctttatcattaagtttaaatcattttaaatacttattataatttttcctttgactcataaattacttagaaatatgttgcttaatcactgtggggatatttctaggagtttttttttctagcttaattcttctgtggtcaaagaatgtataatgaatgaattcagacattttaaatttgttgagacttgctttatgacccagcatataattaagcttaataaatattctatgtgcacttgaaaaaaatttgaattctgtccttcttaggtatagtactttttatatatgttaattatatcaagtttgttaattttgtcgctcagatcttttctattcttcactaagtttttgtccacttattctaccagctattgaacagggtgtgttaagatctcctactatgattgtgtttctctgtttcttccttagttatcttttgctttatatattttgaaactgtgttagtggatgcatagacacttagaattattacaccatcctggtgtaataacaaaactaaagttttgttagatgcagccctgatggcagtgaagtctcaggttttcatttgtctgaaaatggcattattttactttcatatttaacagctagttgtaggctttacagaccatgtaagttctctatcacatattcattctctctttctctttcccttccctctatacctcttatagaccaaagtttactgactcctgatctatattattttctccctctactttggatttaatcactgttcctttgtaactttttaacatggatgattaattcattaattcctagcctttctttttaactcttgcaagtatttaaggttattaatttttttctccatactattttagctatatccccaaaattttggaatgtaatatttttgttattacatggtttcaaaatattttctgattttcattttggtttattatttgacccatgaattattgtaagtgcttctttgtttgcaagtatgtaaaaactactaaatatttttagttatttttattatagatttcttacttccattgtggacaaaaagcattgtctgtatgatttgaaatctcttgagaactttgcttcacgattcagaatatgatcagtttttttaaaatcattccatgtgtgcttgaaaataatgtttagtcttctgttttggctgcattgtatttgtccatttggtcatttattatgtttttcacatcttctgtacatttattggtttattttttactttttctctcaattaccgatagagatgtgttaaaatctttcatcatgattgagtacttgtctatatctccttttattcctatggatttttaatcctgcataaatataatgctatgttattgaatacagcaattaaactgatttcttcctcatgaattgagcagttgaacagtgtagagggtgcttattaaattctactaatgctttttgccttttgatttattttatctgctattgattcagctatgttagctttccgtaagttaaaacattcctgatgtaccatttgccacctttcatacctttacctatagcacttttgtattcctctgttttagatttatctcttgcaagctgcatgtagttaatttattcataaaatcagtttcacagcctttgtcttttaacaggtgcatttatttttaatgcaattgccattttcccccattcaatgtggtgtttattctctccttacacatcttcttttaaatcaattaaatattgtttaatcatgtctttttaaaaattctacaagttttgaagttataccctctctttccattattaagagtttacccctaaaatatgcgtatgaatcacatctcaaattaattaacatcttaacctactttacacccaggcaagacagggactttggagtagtttagttttattcatccttattctctcctgttttgtaagttgttgtcatttattttagttgtatacttttaatctcatcagacattagtgttttatatagtcaacattcattttgatttacccatatgcttaccttttttgtttctcctcatttcttcttgcatgtcagatcttccttctgtttgaagttcatcctttacagtttctttaggtgagtgctaattttactctctcagtttttgttagtcttaaaatgtctttgttttgccctcattttttgaaaacacttttcatgggtctagtattatagattgccagttattttcattcagcacattgaagatttttttttttttggcttcttctttccattgttcctttgaagaggtaggctgtcagtctatcactcctttgaagataatctggtttttttctttctctaggtgctttaacatcttttctccctgtcttttatattgtgcagtttcactaggatatgttaaggaagacattaattttattgttcttagaatgtcttagacttttaaaatctgtgagtttatttttacatattttggaaaatcctcagtcagtattcaatattgcctgattcatgcctttctgaattttgattggacaatgttagatcttttcagtctattcttatgtctcataaactctcttgcatcttttctctttccctctttgttgcttcttacttatcttcaaatgtattaactttttccttcaacagtgtccaacctgatattaaactgattcttacttttttactttaatttttatatctttcattttaagttctatatgtgttttccaaatctgcctcttattctttggtcatattttgtttaattcttttgtgtattttaaacatttttaacatgcttgtttacagtctctaatcatttttaacctcaagtttataggtatctataaactgctgattttgtgtgtatgactcttactcacagtggcttgttttctgttgtgtttgtagttttgggttgtgagcaggatgttatatgtgggactcttgtgtggcctgtgttgagagtgtactcctcttagagagattgtttttgtttgtttgtttgtaccagtttcccaagaggaattacctttggtacttagaaccaattttaggttaatttcttggcttactggttccaagccacaaatcaatttaggtcaagtcttcatgacagtcaacatttccggggaagtttttattttcctctgctaagcctaggctaaaagagacaaattttcttcccaactgcctttgccagagcaaaattatttctaatctttgcattcaggatatagtttttgaggatcctaactctatatggaaggaaaaggccatccccagtcccaattccccacatttcagggtctccagccttttttcgagttcttatgaagtgattaaacagttaaatgtcttcactcgttggcagttgctggtttggtgcatactaatttccatcccatatttatttccggttgttggagatttactacactttctttcaagcttggatatacatttgaaaggattattgaaaataagtatttttattttctgacctcttttcctctttaaatctgtgccctcctgctcatcttagggagagggatttctcttttcaaacgaccagagacaaagccttcagcccctactttatctgcagtgctacacgcattcacacaagatcttattttaaattattttttgctaagtattacagagaaatcaggaataaataagcatagagtaactaacaaaagtaaaaatcaatgagggtttgtagggatataagaaatcttttcattggtttttaaaagttgctttctttggttcattaggcttaacacctaaaggccaggtctttccttacattcctcacatggttccttttcccgaagatctactcaacttttttctttaaatcttttttatcctaatactacaatctaaccaatgaatgtaggcaaaaaaaaatttaacatgctgtatttagatgtctacccaattcaagagtgtaatttgcatttctgagaacctctggacagtgcttctcaagcaatctgtgttgaaggacaactcttttctttagatttccaattcactgtctccctatgcttctataaaatttaataaaaatattacagcaaagcgcattgctataaaagctcctaaacacttcctcccattttctgtacttgcctcattgtgcaccagctgacctccctttaagcagcaccaggcactctgtgtgcaaaagcttccctttatttgcagttcatagtctttcttgcatgaatgtcagagcagttgtgcttactctaaaaaggactttggtgtataaaggtaccttttaagccaaagcattttggttcactcattcattcattcattagtatatgcataaatatactcctttatttaactcaggattttggacctgtatatgcataatacatatatggggctttctatatgccacgccctatcttaagtactttcccaatattaaataatataatgttcataaaaactctgttagatcaggactattattatctccatttttaagaattgaacactgaaacagagtggttaagtaagttgcccaacaccacactgctaagaaatagtggaactgagatttgaacccaggaagtctaactccagcttctgtgcctaaccagtctgctggctgcctctctgatgactaccttagacactctagtccagattctgcaagggtaggtgttccaaagcccactatttcatcctcattttcaacttgaatcagttggtctttattgcacagacctctgaattgaaaagggaaatcaggtctttcacctcctttgtgggaagagtgatgattggttagcgtgtctgccatggaaagtgtggtgatttttcaatgctgcttgctatggtgtagaggggattgacagaagacacttcagagaagtcacctattagcttcagggctctgtgccttcaaaaaaattgaaaattataaccaaactaaaaatttcaactcaatctattgaaacagcggaaaaatttagtcaaactagcattagtttgcattagttagattcgcccaaaatatttttaactgaattcaacccatttttaaaacttaatcgagacaaatgagttaatttacatagaaattgtctttggcaccagaacagaatgtctccattgtaagactatagagtaaacccacatgccatttccttcgtcttgaacatcttcacatctacaggaaaattggaagatgagtatttatatatcttgcaccaaaaatcaccagttttcgggactttgtcacatttgctttatctctctttatgtgtatggaagtacatacactttttctgaatcatttgaatgtgtattgtggatacttcacttcttctgaaaataaagacattctcctatatgacttaacagcattagaaaattagcactaacttagtaatgtcaactagtagagcccatactcagattttcccaattggccccaaagtcatttttgtaatttattttcattccaaaaaacccaactttatgcgttacatttggttgttatggctctttatgcactttttgaaaaacattctctcttcttttgtttttcatgaaaatggatattttaagattcccagccagttcacgtacaatggtcatatctcattgttgaatgctccagtggggttaattcctcacccttctcccaagtgtagacctcggggtcatatgaccctgggttactctccttatatctgtaataaaggctggaacaagcagaggccctgctgatctgcacagtctgtagggataggaaggggaaagtcctgctatgcctagacactggcagtgagccaggttggggagagagaaagctcaagggaaaggaattggggtgtggggaggaaggaatatgggaggaatgggataacatggatttgaggcacttgctcattatatggacccattggatagccactccccacctaggaataacaagtcagaagtcttaaagaagaatcctcagtctctactgcaggggagaggccaagccagcgcctccccagaaccggtggcagaggaataaacattgtgtacagcacatattcgtcagcatttaatagtatcatttatctgaagatttgaatatataatgtatttttaaatactgtcttcatgtgatataatgaaaaaaattgccaaattcatgttggtgttacagcgagggaggaaggaatgagagtgaaatgggggaggcaaatagagggaacttcagcttgatctttactcgtttttcttttcttttatgttgaaaggaacctgctggtgcaaatatggcagaggggtgacattcatttggttttgggtgatgggtgtgtttcttttggcactttacaaaatttgagctccagttttgctcgttactcagtaatacggcttttgaaatcatataggtcagagaagttaaaattggcttgccacaaactcaaccataacaaacaaaattagactggccttttttgtgatctgattttgtcctggatgtgtgagggctcctgttaagggtcagcggatcgtgggcaagtttacttactccctgtgagcgtcagtttccttctctgtaaaatgggaataacatcccctgacacagagctggttgatttattgaaggtcctgcagtgtgcaggagaacacactaacccagccagcaggagcttaaactgtgaggtcatcattatcccacacaactcagagtctgaaaacagggatgttcatggcagggctggcagctgcacagtgttatggaggacccaggcacacatagcaccctgctcttctctccccagcgggtcagtgctagctccagctggggatgcagtgtagctgtggccgcatcaggccacacatcctcacactgcatcattcagggcagcaagagagagcccctgattgtggcccttgtgaaggaggagcaagccccagcaggtctcctgttacatcttgtgagccaggcgacagcagtccatggcaaggggagtggaattgcacagatcgtcttggacgtatgaacatttgcacgttgccccatggggcaggcaaggaggcttgcctgaaaagccccagacacaagcagggcgctgtcagcaaggatgggagggaaacgctgtggggcgggcaagacaacgaggtctgccgcagaaatgcagaccacctgcctcattagcatattccctgtccctcctctccctgattgtctactcatgttccctatactccctgatggttgcccagagcactagcagctgagatcaatgcagaggatgaacaaggctgcccactttggtgtcaaatgtgtcggatttccaggtgttacagccattttgttgagttttatgcctttgtaagcaaagatcctgccattttattttactctgtggcaacccagttttactgtatcccagcctggttgttataaacactttttaaaagtcaagtgagacaggttgctatttcacagcctagagacaaagaagtgactaagtaactgcgtgttttttccaatgacgtccacaacggtccatccagtggtagtgtcagttaaagcccttacttgcatttctcatttagctttaataaggtgacttgtaggtggtaagaatataccaatttgttagtgtaagcattaacatcttcatataataaatagatgttcgtctacttaactttgtagtgttaattttaatacatgcttttatttagaattaagggcgcagttattttttatcagtaatgccacttattacaatggaatcactgaatcttaaccaaaaagcgctgaagagtggataaggattcagtttaaacaaagaaccaagaagtttttttatattaaactttgttaatatggcaacacattaggcaataactgtctgactctaaaataaatatactcctgagggccttaattttcaagcttactcgcagtctttatccttcatatttcattatttctattctgatagaaacaacaccttttattaaaattagatatttttatttgtacaaatttatggggtatatctgaaatttcgttacatgtatataatgtgtagtgattgagtcagagtgttcatcacccgagtacaatacatttttgttaagtagaatcaccctattctgctatccaacattgaatgtattccatcttactgtatgtgtgtaccctttaacccacttctcttcatcgtccctcaccactcacccttcccagtctctggtatctgtctttgcactctctacctctatgtgatcacatttctaactcccacatataattcagaacatacaatatttgtgtttttgtgcatgatttatttcacttaggataatgacctccagtttcatccatgttgctgcaaatgaatgacatcattcttgttaatagctgaatagtattctcctgtgtatttacacgttttctttagccattgacagatggaatgtagaaatgtaaaacatgttctgcttcttcagttgttcaaatcctattaatatttctctcttttttaaagaatttttgattaaaatgcttttataatttcttggaaatatctattataaacattctcatttgattgaagttcccaaagtgttgaaggccctagggaggtgcatgttatatttcatcctccaaataaaaacatatatatgtcactagaagtttcacataacattagaagcttgatacaaccactcataagcttgaagcaatttttaaacaattttagtattatccaagaagtgacatgtaagatgacatttgtgtcacctgcctaacatgtaaatgagccaggctatttatcctttccatagacacattcttttgaaaagcagccatgagtgcagatgcacctgtcatcaggtaggatagagtctcctgtagccatcagcctggagattacctttgcctcgcttctgtgctattcacccatttccctcctgtttcctgtatttctctggttttggtttccaccctcattttgtggagtacatcctcctgaagcttcctgagaaagagtgaatgaagatgtcttgacatgagttcactagaaaacagaacccggccaggcgcggtggctcacacctgtaatcccagcactttgggagactgaggtgggcggatcacgaggtcaggagattgagaccatcctggctaacacggtgaaaccccgtctctactaaaaaaaaatacaaaaaattagccaggcgtggtggtgggcacctgtagtcccagctactcgggaggctgaagcaggagaatggcatgaacccaggaggtggaggttgcagtgagccaagatcgcgccactgcactccagcgtgggtgacagagcgagactctgtctcaaaaaaaaaaaaaaaaaaaacaaaaacagaacccaaggtaactcccaatggctatttatttcagagacacagtcccagatgtgttagcaactagttttattgagaaataaggctgctctgaatttcttatatgagtcttatgttttcatttctcttgggtaaataaatatccacgagtggaattgctgggtcatatggtaaaggtaggtaatagtccatttcacactgccataaagatactacctcagactgggtaatttataaacaaaaggggtttaattgactcacagttcagcatgactggggaggcttcaggaaacttacaatcatggcagaaggggaaggggaagtaggcaccttcttcccaaggtggcaggagagagacagcacagggaaaactgccacttttaaaaccatcagatctcatgagaactcactcactatcatgagaacagcatgggggaaaccgcctccatgatctaatcacctaccaccaggtccttcccttgacacctgggcattacaattcaagatgagatttgggtgaggacacagagccaaaccgatatcagagtatgttgaactgtattagaaattgccaaaagtttttctaaaataattgtgcctttttacaatcccaacagcaaagtatgaaaactccagttgctccatggccccttagacatctgtgctagtatgcaaaatacaattgactcttgaacagcacaggtttgaactgcacaggtccacttccacttatatgtggatttttttcaaccaagtgaggatcaaaattacagtattcacaggatgcaaaatccatgtatatggagggccaacttcttagacatacaggttccacagagccaactatcagacttcagtatacacagatttgggtgtatgtcggcggggtcccagaaccaatcctgtgcagatacttggggatgactgtaccattgatttgtgtatattgatcttgtatcctgtgaccttaaaaaattgcttattagttatggttttttgtagcttccttatgattttctgtgtgaactatcatgttctctgctaagaagaatagtgttatctcttcctttctgatttgcgaatacagattttatttctttctcttgacttatttcactggctaggacttctcatactatgttgaatagcagtggagagagggcgcatctttgtctttttcctagtcttagaggtaaagcattcagtctttcaccattaggtatgatgttagctgtatgtttgtgtagattttttaaatcaagttatggagatccccctattcctagttttatgggaatttttaattatgagtattgaattttgtcaaatgctttttctgtattcatgatatgattatgtgatttttcttctgtagcccattaatatggtgaattatattgattgattttcaaatattgagccatccttgcatcccttggtcatggtatatagttctttgtatatgttactgtgttctacttgtttgtattttcttatgaattttgcatcatattcatgagagatgttactctgcacttttctctctttgtactttttttgattttggtatcagggtaatgttggctattttctggaggagcttgtgtaatattggttgttgttaggtatacctcttggtataacctttttgggaattgttctagttattacattatatacacatactttatcaaagtctattggtgttgacattttactactattggtgaagcatataaaccttacctgcctttttgcttctttattctctaccatttataataaaattgttttaaatatttattcaacatacattgaaacatataaacagataggcaatgtcataatttttgctttaaccatcagacataatttagaaaactcaagagaagaaggaaagtcttattatgtttgcccatatttttgttctttccatgttcttccttctttatatgccaaaatgccttcttttatcgtttcctttctgcctagagaacttcctttagccatttctttaaggtaggcttgctaggaacaaaatctccttgcttattactgaagaatatttttgctagctttaaaattctgggctgacagttattttctttcagcacttaaaaaatattatcttggctgggcgtggtggctcatgcctgtaattccagcactttgagaggccaacgcaggcagatcacttgaggtcaggagttcgagactagcctggccaacatggtaaaactctatctctactaaaaataccaaaaattagccaagtttggtggtgcatgtctgtgtcccagctacttaggaggttgaggcaggaaaatcacttgaacctaagaggcagaggttgcagtgagctgaaattgcaccactgcactccagcctgggtgacagagcaagactctgtctcaaaaaaaaaaaaaaaaaaaatttatcctgcttccttctggcctacacggtagccaatgagaaatgcactgtctttagaattgtttttcccatataagtaaggcgttgtttctccttggcagcttttaaggtttctttgtctttagtttttagaagtttgactatgatgtattttggcatgagtttctatgggttttttttctgtttagggtttgctcagcttcttgaatctgtatgtttgtttgttcatttgcaaaaattgggaaccttttagtgatttagtgattatttctttgaacactttttttttttttttttttttgatacggagtctcgctctttcacccaggcctaagtgcagtggcgcgatttcggctccctacaagctccacctcccaggttcacgccattctcctgcctcagccccccgagtagctgggactacaggcgcccgccaccacgcccagctaattttttgtatttttggtagagacggggtttcacctttcaccgtgttagccagaatggtctcaatctcctgacctcgtgatccgcccgcctcagcctcccaaagtgctgggattacaggcgtgagccaccgcgcctggcctcttcgaatacttttttagctctaccttatttcgcctcttctacggactccagacttttgtcgcagtcccacatgttcctgagttgtgttctgtatatgtgtttttttttttaagtttaatttttctctgttgttcaaattgggtgatttctatgttatacctttacattacactgattctttttctcttctctccaatctgcttttcagcacatccattgagtttttaaaatcagagttgtatttttcagtccctattatatctgcccatatttttgttctttatttggctctgttttgtatcttctattgttttggtaagactttctatttctttactacattttctaatttttcatttgtcttaggtatgtttgtaattgcttgttgaagtattcttaggatgactacttttaaatcccagtcagataactctaacatctgtcatctcagttttcatatcttttcttgttctgtttgaaatcttcctggttcttggtataagtgattttttttgtttgtttaaaagggtatatatttggtattaagttataggactctgggtcttacttaaatcttgtgttttagcggacctcctgacaccactctggtaggttcagggggccattgcctgacaactgccagagggtaattgaagtacaggttccccctctgcccctgttgatacctggggaatgggcttggtacttcttggcaggggtacttcctagctgagaggaggcagagattctcattacagccagatgagtgtgaaagttcaggctccctgtgtgtcctctgaagatagagggcaaggtgcttattaccacccagtggggttgaggtcttggctttgtactcagccttctctgacactccccaggtgatggagcaggcagtgatgagcaccttgttacagcctggtgagggtggaagtctaggcttctcactagaactttgctggcaggggtggtggtcgggttataattttttctgtgatgtttggctggaatagaagaggaaatgtctaagcagctactgttttgctaagctacccctttcctggtattctgtctagagagagcatgctttttcttttctatctttttttttttttttttttttgtggcctactctcattggttcgtttttacagtatctaatctgggatatgtgaggcaaaaagaaactccagggaacccaccattatgtcgttcctcaagtctcaagatccctagttagtctgccacttcttctccacttttcagagtcttctaatatgattttatacataatttccagggcttttcgttgtacttagtaagagaaataggaaaaagtacatctgatctatcttccctgaagtggaagtctctaaatgtaaatattcatgaaatttaacataactacacctatgtaactataatggttttgatgaatcaaatgaaatatgaactatactttcaaaggtatgtgtgcctcaaaaaagcaagacggtgaaaggaaaaaatagctttcaggagggaaagctgtgttcaaggaaattacaaagaaatgttttatcttgtgtaaaatacgtttccagattcaaggagagaaggtgctggccttgagtttcttaatgctcatgctaattgatgggaggatttggccacttcttgtcctcaaagggaaaagaaatctatattttatttgaggagagaagtagccataatgttccccctttctattgaaacctgtagaaaatctgtccctgatgtttatgcctccttagcaaacacccccagtggccccttccttttctgggatcctgttctaaagtgagcttcttttccaggtcgcctgaactggtggtccactgtgtgcacgagctgtaaacggcttcttcctctggccacaacaggggatgggaactgccttttacatgctgcttcactgggtaagctccacagcacagacagagggtggccaggctccaggcctgcgtaaggaaagacatatgctattgaaggaaacactattgaaggaaaagcatacactaaatagagtcacccatgtcactgtcatgagaaagtccccaggagacagagccaacaatcctggcccttcttgtcaagtagcacttgctggagagacagaacacacataagaaaagacctggcgtgatagaaggaggccttgagcatagctgcagggatgggacttagagaccgtcgcctggtacaaataaaaaggacttcctgggaggaggtgggatctttactgaaacttgaagaacttgagagactagaagagggcattgcaggcagggagaccctgcagataaagcataaaggcaggaatggacagggtgtttggaggtaggggtgaacgaggtaaagctggagtaggaagttttgggagcagtgcatgaggttgggtaaatgagggtccactatgttgacagcagtcaacagttggcatggactaatggaaacagacgtaggtactgctcagataaatcacaggggagtcagcatagtcagaatataccacagagagatcagcacacttgtccaatagagacgtgagcttcccgatcacacaaagccacacaacacagaaatatttggataattgaggatcatcatcgactttctggaacctcagttatccctttaggcccagcgttatatgcacaaggctgaatccattttgataggtgagtctgggtttgcaccagggaccatcagggccggttggttcttacccgccctggaggatagcgcctctccaaaacacacaaccctcacacaggaatgcagtccttgtttgtcaaacttgcatccccaacaaacatggctttaactgggtgccatgacctacatcaagggccagcccccagacctctctctctttggacctgcggtgaggcctattcagcaagaggtaggtgagataagactgtaaagggcttcaagggaaatacatcagggtcttgaagggttccagaggaggatggagaacaagggaagcattccccaggcttgacctgcagtgaggaaaggcaaggcagccacttacctgcttcatctccatgtcattggagcacattctgcttgttggcattgcaaaagtactccacattcaccatggtgagaaaatgaaaatcagcgacccccacccagcggcggccactcttaacagtttggtattgtcatcatcttccggtcttttgtctgttcttcaggtgaaatgatgatcttgctgtgttcacagtcttgaatccaacattttcccttacaatctgagaattttccctgctgttatccttcaaacacatgattttaagtagttgggtcttattttatcatagtggataacattaactattcccctgttattgagcatattttgccttgttctttctaaaacctggagaaagaatctaaaagaataaatctctcatctgtgtcaaacagcagcctcattgtgaagtctggggcatggaaatgtttttgtccctcagcaactgcagcatgtagagtcattgtccccatcagcacaacagcggggcaaggccacaccccacagcattttccctgtgagcacagtgggcctcccaggcctgcctgggaagagagagcctccctcaggctggtcatttccatctgcaagagagcctgggccatgactgaccagggctgtgagacccccctccaagaatcccctgtacaacaataagcccagagctcatagcaatctgtcctcttatcccagcactttgtttcattttgtgcccatatagctaaactccgcaggactggggctgcccaaagctgccacatgacattcaccagcagtccttgtggaacccctgttggcctggcctgacgttgagctaggattgtggggcacatatagaaatgacagtcatcttggagtcaggcctgtaggcagatatatgcaggacaaggaggccatctctgcaagagagacctgcccaaggagctgtgggagagtcccagaaggcagctgaaagaggtctgaggatgagcgaggagtgacagtggtcattccccctcccctgccatcctatagaaaaaggcgaagccttgctggctagaagcctgtggcaggcctgggctattgcatatccaaagatgcccagccagttgagcctttgaaaacatcagttcacattactctccttctgtagactctccagaggctcacagttccctcgagagcccccttttcactctccctctctcctcgatcccactttagccacctttccctcttgccttttctcaagtactgccccctctgggtctgtccctggcctttccctgtgctgggacagcaacttggctccttcctccacccatttgagcctttgctcctatgtctccattcacgccacagcagatctgcctgcctcacctctcctcgtggggctgccaccctcaacatcgtacactctgtgccagcctcgtggctatcctcacttcccacttccccacaacatgtgctccatgagattttaggaacttcatgtgtcccggccactgccacatatattcccagcacctagaatgagtgagtgggtgcgtgggtgggtggatggctggatggacggatggatggatggattcccctgtgttttcccttgtagccagagctgcccttctcttgagcacttctcccatgagttggggttcttgatcacatctaagctgcccagagcacattctcagagatggctggtttctctctatatcctctcagcacctggcacagggtgagaccctctcactaggaagcaggcgctctctcctgggccaggtgtgtgcagtggtgtcactgacgctctgcttctcaggaagctgagatgcctcagggctggagaggagggaaatggcagaccctggagaagccaggatgctaatggcctccctcacctggagccctccataaggacactggacagcctgtccctgtcccctagtcagtcccccacccaaatgtaagacttgaataatgaccattaggtcctcaaagcaaaccagcaacattgagaatgggttgccaagggcaccagagaggaaaagcacttgattttcacccactattgttttgctaagaacaggatgtgctgcttcattcacctagttgccttaatgggaagcctcaggaagaaggctggaggggaattaacagaaccgctgagtaaggaggctgttctgcgtgcagacaggaggctctcccagtgggtcgtggtagtttgcatcacctctggcttgtcttttctcatgtcctttctctcctctgttctccctggcctcctggctccaggaatgtgggggtttcacgaccgggacctggtgttacggaaagctctctataccatgatgaggacgggagctgagagggaagccctgaagcggaggtggaggtggcagcagacgcagcagaataaggaggttggtatccactggcatggccagagcccgggacccaggccagatgcagcctcgggccgtggtcgagtccacagcatggcctccaggccccagacagtcttatgaggggaaggcagaaacagcccctgggatcaggaaagtctcctgcttttaagcccacagaggaggagcctgttaaaatagcagagtcccggcagacagcaactatgcgtccacttgtgcttccttaaggcataatcatgaaagctgcctaccttcattcccaaaagcatcctggcttggatgatgaattatatatatgactgcctgctgtcaggtgcagcccatggccccagcccctgtgtgtgagctcagtccaaagggattcccgattgtccccaaccatggtaaacatgaggaccttgctctcctagaagaatctgaacggccagccccagttaggtgcaggcacaggttaatgctcggtcatccccagcccctgagaatgacccttgttggtgggcagattcccagcagctctggaattagagcttggggcttctgaaaatatattgtgcatagcaaaggtggccaagagggtgcagttggtatagttggtagctacctacagatgtgcctggcctgggtcccggtgaggctggtccagattgggagggtgaggagaggagggcagcgcagctgtggcccaccccccttctgagccggctcccctctgccagtcagggctggtgtacacagaggaggagtgggagcgggagtggacggagctgctgaagctggcctccagcgagccgcgcacacacttcagcaagaatggcggcacgggcggggggtaagtgctgcccctgctctccccagaagtcacctccagctccaggccacccagggctacacacagcatggggggatggcacgggggggaatgtgggactcttgtgctgtggaagacagaaagattccagctttccagcattagcttcaagacaaggacgcacgggaggaccgtgggtgatggctggccccgccaggtgctagtggaagggtatgcagcccccacatgcactatgcaggcagaggtgagctcacatgagctgcctccaggccactttccttgaactttattgtgcacaacagttggggtgtgcgccttcagggcacagcaggcctctggaggtcacacgtgatggtgagcattcccacacattgccatcgcacgaacctggctctgaagtttgggttttctcccccaactaattaatttgtggcttcaagaagttgccctgaaagcagaagctcattaagctagcctggtgtttcccagatgggctccatggatattatatgtgttcccagcaaaaagacttcacatctgtgcatgtttaggaatagcttgttcctacagaaacaccttggatgttctagtatggaatgaagaccgtggccagaccagtggggcagccatagagccttggccgcggcttattcttcagttcatattctctggaacctgaaagcaaaggtgttgctcctagagaaggtctcagccaaacatgagaaagtgtgagcagtaacaccagggagacccatggaaggaggattgcatgcagctccaggctgccctcaggctcatgggccctgcagcgggcaactgggtcctcacccacccaccaaggcagggcctagtgcctcatgggccagctctccctggaggccccggctggaaaagaggctcccacagagctgcagctgcagcagtggcgtccaagaccatgtttgaagatgaaatcattagaaacccacatacgctggcacacccttcctccagggctgtcttgtcactgtgttttaaggctatgttatgtccataccaacagtctatcttggcaggacatttgaggacaagcattctgaagactcagtcgactgtggaaaactgctctcttcctctgcacgcctcccgagtcctgcctgtgatgggtcttaagtgttcctcgacatcgttttcacagttgcctctctccctcctgccacagggaggacgcctgataggtgctggcagactggatccaggccaggtgtctctgccagggacagggaggagtggggaaagacagcagcaatgatgactttgatagtgggtgaaaatcaatcacaggtgaccatcacatacacatctcctgagtacccccatccaggaggagcttcgcccaaggtctcatggctagtcagcccatctgactcctaaggccacagtctggtaccctgctgcctgctccctggggcccgagggattcagatgctaatggggacacaggggccacttggtgtctgtccctatctcccacagagtctgagtgatcaaccttaatctaacaaaaggattaggtccctttaggaatatccaaaatggcccagacattgtcccatttatgtaggatagcctggtcccctgcccctgggagccatagttctggctgccacatcacaaaagagaaggaagaacccggggaatggccagagaggggaaactaaacaaccaagggtggatgggagtgaccccatcaggaaagaatggagagatgaggcaggaaggtatgggtggtgttgggggaacggaaggagggaggcgagcacaggtggggtggggtggggtcggggagaccataagagggccctgtgctaggcactctctcccctcctttcaaactctgcctcacaagcctccagtaccccttccacagattcaaaaactgagcctcaatgggattaggtaactgttccaagaccccacaaaaatgataaatggaaggagccaaaaagtcaaaatttggtctgatcattaagtctcctcttttgaccaggctctacagcctaacaaaatccctcaaatacagcagtctgtagaaaggacacagccacctggtccccacagatgccactgatgctcaggtcagaatcctgtgccagtgatgcaggaggcatttctagggtttcagcaacaggtgtttccagtggagaaagaaaaagggaaaaaaaaaaacaaaaaactcagaagaggacagagcatatgcaataggaatctaccaaacagagttgcttctgtagccagatgcctccttgggttacctggaacctttgcatggccagtcaaggagggaggcctttggaaccaggcataaaacattttcctgggaatggggagttttggctgagtcccatggactggggtaacggacagagagcgcctcagcaaggcacccgtgcagctgtgcaggactcgccaacagggtgctccagagctcacctgctccaagaattcacttggggttcagagtccacaagagaggcctttgtgcacaagcacagttgctctgccttttgcctgtgtcttctctccccatgttgagctgagaggtgtagggcatcatctctggggcttgagggctgcagggttgagtttctgacacctgactgaagcacctgaaggcagaaactggcgagctcagggttcacagggctgtggtgggctgtacaggccaggacatggggccgtaggggatgtaaggccaggatgctgcgagctgcccgaggtccaggcatggattcagggaggaggccccaagcgggctggcttcaggactcatctatggtggggaccacacagaagaccagcccctgaggccagggctgagggtggacacgagtagtcagtgagaggagccaccactgcagcccagggacctaaggacacagcccctcaactggcagagagctctgaagacccaaaaaaagcacttcctcagacagcaggtcagcactgggacctccagcgagcccagcgggccctgaaggaagacagcaagaaagactttgccaccctcctgcccctcctccctgcctgtgccggccccacaggggacacagacagcagccagagaaggggaggaggcaaaaggtgaaacagagaagccagctggaagctaacccagtctttcaggaggctcaagcttggggctgatagccccctgcacaggaaagtaaccagaagaaccacacaaaatttccagggtgccacccgggaataggaaagagcaagtcaagggagagtttgcaggcatgatggcgagaagaactaaggtggctttattcatcccagcctgggtttcccagaacctgttccccacggatgagggtaaagggtgcagtgcgggccctgcatcctgctctgggagcccctggtatggagacagatggggcagcccctgtactattggtccttgacacagatgatggcctggagtcattttaaacttgttactttcccagaaagcaactatgtcacgtatctgaagaggtcagcagggaccagagaccaggtgtgggtgtgagctagacctgcttcctctcactgtgcctcccaggaggactcacagtggccaggccccggccacgtggaagaaccaggccttccctagggcttggggagggattagtgaggtcagatgggaatgtgaacagtgtcatctactgagcccatgttatgtgtcaggcaggcctatgagctgtcattatcatcaccaatcacagagaaggaggctgagattcagagaattagataatgtattagggttctccagagaaacagaaccaataaaagacatacatataaagagatctaatgtaggtattggctcacgtgattatggtgtctgagaattcccacgatctggcatgtgccagctggagacccaggaaagccagtggtgtaacacgaaggcccaagagctggagaactgatggtgtggatccagtctgaatctgaaggcctgagaaccaggagtgctgagggcagaaagtccatgtcccagctcaaacaggtttggttattccgccctccgccactgttttgttcccatcatgaatagatcagatgagccccacccatattggtgaaagccctctgctttctgctctccagcaattcaaatgctaatctcacccaaaatgccctcacagacacatgcagaaataacgtttaaccagctatctaaccatcacaggttagcttccaatgtcccacagcctgaaagacacaaagccagaacctgaacttagaactgaccaaagaaacctaagcccacactcttgacaaatgcagaccaggcatgaggagtaggaatcaacaacttatcttgactatggtgaaaataatcatttttgttctttaaacttttaaaagaactacttatttgttttctgtttgatgagaagggctaagtggaagctgagaggccagtccgacagacaaagaggagaagagagcagagcaagagggaccgtttgggggaccctctggcagcccccgggggcatcttctgtctaggtccttacttttctcacatgctaacctctctgctttctctttgtagttgagtttctgaaatttcactgacaatgtgtttgctgcatttctttttattagcttttttcggaagtagctagaatcccaagtgatttcctagcacacagtctgagagttgtcaatttcagtcagtcttttgaggaaaagcaagaggcattttattcctgggagatgcccacaccacagcctggtgctcccgggccatgggctggccttgtgaaggaaaggaggcattcttatgtgtattcctgaaggtgccatgacttccaccagcagaccaagcagaaagagcatctgctaacgtaaggtgtcctcactttgcagatgtgggacccggctcaaatttttaaagacatttctaattgaaaataagaccaaagttgactatctagggatggttctcaagtaggagccttctctgatcttcctgtctaaagaatccaccttttatcactctactgagagttttttattattttattatttatttaaatatgtttaggggatacaagtgcaggtttcttacatgcaaatattgcattgtggtaaagtctgggattttagcgtacccattacccaagtagtgaacattgtaatttttcagtcctcacccccgcgaaccctccggcctgtcatagcttccagtgtctgttattccattctgcctgtccatatgtacgcgttgtttagcccccagctataagtgagaacatgcagtatttgactttctgtttctgagttatatcactgaggataatcgcttccatatccatccatgttgctgcaaaagacaggattccattcttttttatggctgagtcatattccatggtatatatatacattttctttatctaatcctacgttgatggacacttaggtggtttctatctttttgccattgtgaatagtgttagagtaaacatgcaggtatctttttgatagaatgattcatttccctttgggtatatacctagtagtgggattgctggattgagtggtagttctatttttagttctttgagaaatctccacactgttttccataaaggttgtatgaatttacattcctaccaacagcatgtgttcccttttcattatatcctcaccaacatctatttttgtttttgttacatttgcttttgaagacttggtcataaattatttgcataggccaatgtccaaaagagttttacataggtttccttgtagaatgtttatagtttcaggtcttacatttaggtctttaatccattttgagttaatttttatatatggtgagaagtgtgggtccaatctcattcttctgcatatcgctatgcaattttcccaacactaaatagtgaatgacgcaaaatgaatagtgtcatttccccagtgtatatttttgttggtgttgttgaagatcagttggttataagtatgtggcttcatttataggttatgtattctgttccattgatctatgtgtctgtttttgtaccaataccatactgttttgtttactataaccttgtagtacaatttgaaattagatgatgttatccttcagctttgttctttttgcttaggattccgttggctagacaggctcctttttagttccatatgaaatttattgttttttataatcctgtgaaaaatgacattggtaacttgatagggattgtattgaatctgtagattactgtagcaatatagtcattttaatgatgttgattcttggaatccatgagcatgggatgtttttccattcatttgtgtcattgacaatttttttcttcagcattttgtagtcctccttatagagatctttcacatccctggttaaatatattcctcgatatttttgtagctaatttaaatgggattgccttcttgatttagtcctcagctagattgttactggtatatagaaatgctactgctttcattatgttaatgttgtatcctgaaactttactaaatttgtgtatcaaatataacaggtttttggtagagtctttatggttttctaattataaaatcatatcactagcaaacagggatgatctgactccttcttttccaatttggatgccttttgtttttttctcttgcctgactgcgctgtgggtacttccagtactatgttgaataacagtggtaaaagtgggcatcctcatcttgttccagtccttagaggaaaagctttcaacttttccccattaagtatgctgttagctgtgggtttgtcatagaagacctttattatgttgaggtatgttctttctatgcctagtttgttgaggattttcatcatgaagtgatgctgaattgtattgaatgcagaaatccttgacaaaatactagcaaatcaaatctaacaggacatcgaaaagataatacaccataatcaggtgggatttatcccaggaatgcaaggatgattcaacatacacaaatcaatgaatgtgatatatcacgtaaacagaattaagaacaaaaaccatatgatcatcttgatagatgcagaaaaataactgataatttcttatttgatcatgtgttagtatctctccctacctaaacctgcattcatgggcacacatgggcaagtgtgagtgcgcgtgcgtgcacacacacacacacacacacacagcacagtgctagacctgtagtggataatcagtaactatttgtcacatgactgacctcagcttattgatcctaagcaataagtcttgttcctcaagccacactggccactgctagaaggtctttcagagcctaagatccattcagtcccttcgaagcactgggaggcccccgtccttccatctcagcttcccaggccatagctcttagcagagtccctgctagcctgtactgtgcctttggagagtcttttgtaaaaggtgcctgtctgggcaggcacagtccttgaccaggggcaaaggcccacagcaggacataggctgggttcagccccttgagcctcctcagactggctctgctgtgcagggccctacctgagagaggggttgaggcacacctctcagaaatgctgcccatgagatctgtgcatgaggagaaccttgcacctgtgaaaaggagtaaggaccatccccacctactgtgctgtgggtgtctcaggatgcatcaggaggaggaaaaggcagtggttggactagtgagtataaacatgctacctagaggtgggaggatgtgtgcatacagtttatgcgcatttactcacattcatacgtgtgtgcacacagatgtgcacttactttttttttttaatcagatggagtctcgctctgtcacccaggctagaatgcagtggtgcgatctcggctcactgcaacctccacctcctgggttcaagcgatgatcctgcctcagcctcccgagtagctgggactacaggcacaagccaccaatgcctggctaatttttgtatttttagtagagacagggtttcaccatgttggccaggatggtctcgatctcctgacctcatgatccacccgcctcggcctcccaaagtgctgggattacaggtgtgaaccaccacacctggccttgcacttactttttttatggaagggtacaccaaaaaccaacacctatgtccccataggtgaggtgactacaatttatcatccaaactggttcatttgggggaaggaaagtgggcactaaccacttgggatgtgtgaacaggactttcccaagcaaaacaggaggtgtggacaccccatctggaggaggggatatggggagggacctgggaggcttcatccaggctctccgtctgggtggctgggtgactgccctttaacaagacctgccggccccagactggcttccttatctatgacacgcgctcttgccgaggatggtctccaaggatggtggctacagcttaagccagggtgcccccaaactgttccctggggcctgagataccatctggaccttgctccatgacctttgcttcttggtcctgccaggagggactcctcagcctctgcccacccccatctttctcagggtgttttcattgggtagacggtatatccctaaccctggaaattctccctcctcaagtacccactggagaagcagatgtaggtgccctggagaactcagtgtgtggggcccaaagcatgttaggaagttctcaggacatgcacatcttggaggatgaagtcattatattgcatgtcagtcttctttgcagtaagcactgatttttaagcattttaggaattgttatgtctttgcccagtggccagattctccccacaatcccagatctcgcatttgctcagcaaactcacaagaagaagacatgaagtctcagggctaaaagtgggagtgaattttcagaattggtttttctgaaactgatttctaccaatgggctctggtcacagagtgcaggtcacagttccaaactctcgtcccagataagatcttgtttgcccttcattttagagcccccagctaaattggagttccagtaccagagcagctagaaaacctgcaataaggagaaatgaaaagggacctggacataggcgtttacagtgtgcctttcatgggatacttctcttacctggcaggtgtcctaatgcctggttgcctaacccatgacccatgtccctcacatgggaagcttgtttgtactggcagatggctttgtggctcctgtctggcctgtgtctagttttttcttacctgaccatcgctctgtggctgggaccagccttgtgttctccttggcgtctggtgaaaacatggcctggggtagcctctgcttcttccaaaggaaggtgcaaattcaatccaccgccacaatgggaagcaagttcaaaggtttttacttatagatcctgggcatggaggccatcatgagttgggagggcagtgctccatcccagggtcacattgaggcagggattaagattcaggcagagagatccaactagaaatatatataggggaataggatgtgggtcactttaagttcatgggcaaatgtctgaatggtccatttaaaggaagtggtgggaaagtggaaagcccagtctgctaggcagagagtcgcctctaagttcttatctctggccaccagcttgggtctttgggtgtggtgttctacttctaatgcccaggcagcaacctctgctgttttgtttctgttacaccctctacaccctcaggtgctctctggctgccttcaacactgaggctcctggtatagaaccaggaccctccctaagtcttggacaaggagccagaagcaagtagggaacatcattatgattttcaggctgccccccgctggagctgggatcctctccgccaccccctgggtcactgagcaggtttcagttgctcacatggctcccatgctcaacaccaaaactggaatggagaaaggctgctctgctccagctgtcctccatcacctctcaactgggcccgccatcctatcattgctgctgaaataaaatggccctgccttaagttagccatgaaaagaatgccatgccagtacaatggtgcctaatacttaacctttgcaccgttgttaccttggaggccctcttgcatagctactcaaataccagagtgttctgccaggaggctccatgctgggcatggtccaactccatgcctttgccctagcacagaacttgaaggacgggtagatgaatggacagacaagtaggtgcttgggcagatagatggttgaatggaagaattgaaggatgagtacatggatggatgcgtgcgtaggtgggtgggtggatggatggatggatggatggatagaggtacatgtgggtggatggacaggtggatgggtgggtgggtggacaggtgtatgggtgggtggatggcatggatggatgaatggatggacagatggatggatggatggatagatggacatgtgggtggatggacaggtggatgggtggttgggtggacagttgtgtgggtgggtgggtggatggcatgaatggatggacagatggatgcacagacagcagatggatggatggatggatggacaagtggatgggtggatcaatagatggatggatgaagagagagagggagggaaggaagagagatgggtgggtgggtgggtagatggatagatggatgaatggatggatagatagataggaagaaggatggataggttggtagatgttacatgaaggcagagttctctgagggcctctgcagtgcctttcacagcaccagtgtatagtaagtgctcaatgaatatttattggttttttggttggaaatatgatggccctgctttaagttttgcatgaggagaatgctgtgccagtacaaaggtgcccaatactgagccttcacgctgttgttaccatgggggtcctcctgtgtagctgctcagatcccagagtgttctgccaggaagtgaagatgggactcagaacccaggcctgagagggctaccattcaccttgctctgcccgcttctcagtattagtacctgactcaagagcagctcctctctttccagcactgccccctccattccttgaattagggaaggaacagtgctccacatttctagctggggtatttctctctccaagtatgcaggttttaactccatattctctccccctgtgctgttcattatgttgttcaaccattcactcgccggcactcaacgcatactaggtgacagggacaaacaagcaacttccaaaagcacttgaccccccaggcactgcagcttggctttcaggtgtggctgggcaggctaatcacctgcagtgtttcaaaatgcacacccaggagcactgcatttagacctggcataaaatatatgtgtgtgtatgtgtgaatatgtattcatgtcaatacatatttaaaacattcctcttctacttccctttccttccttgctgaaaaagtaagttctaaagccattaggtggggcaaagcaaggtggcatctggagtgggtgggggatgggaggacaccaggggccagagccagatgtcagccacacaggtgaagagggccacctcacggatggggagcagaggtgggagatggctgacatatgggaagactgatcaaataaggaaatgctttagaatgaatacgaacaagttttctgaaagtaagtgaagaaagttgcaaatagaattaactttgtggggttggattggaattggaggtatcagtgaactcaaggttttctataaatattgagagggagagaaagatgaaaataaacatggagagggagagaaagatgaaaataaacatgcaaaaatatgtatccatgtgtgagtgtgaacttgaaccatctttttgcaccaggaagcaagaaagtgctctaagaaatgatgggagctgggcacggtggctcacacctgtaatcccagcactttgggaggctgagacagaaggatgacttgtgcccagaagttcgagaccagccttggcaacatagcgagaccccgtctctacaaaaatgaaaaaagttttctgggcataatggtggcctgtggtcccagctacttgggaggtcagaatgggaggctcacttgaccccaggagttcgaggctgcagtgagctatgatctcaccactgcactccagcctgggcaacacagtaagaccctgtctcaaaaaaaaaaaaaagaaagaaagaaagaaagaaaagaaaaaaagaaatgatgaggatgtcaaaaggacacagatccagctttagagaagccacactgaccacatcaaggagtatctgagcatccacataatcacactaatggattataacccactgaataaaatggaaaaccagaaatccatagtgataccaataaacctataaagatttggtgaggaatggagtatttgcataggttcaagttcctctccacaaaatgcttgttaatttcaaacgaaaaattagtagtctgcaggggcaaggcctggaagatgaccttaaggagtggtccaggtcaacctcaccagtgatgggacaacctcaccagtgatgggacaatctgcagttcacacaacctgataagatgtcacaagaaggactcagcttgacccaatccaatctaactgtgaggaaacagagaaacccttatgaaggacattctacaaaatacccaacctgtaatcttcaaaaatgtcaaggtcatggaagtcaaggatatcctgagaaatgttccaggtgaaggagactaaggagacgccaccgctgaatgcagcacctgatcctgagcaggaacctttgttctaaaaggcattattgggacagctggcacacacacgtggggtctggtgattgcatgtaactgtgtgaattcctgatgtcggtagccgtgtggtggttgtgtaggaggatgttctgttcatagaaaatgagcaagaactttccagggtgatggggtgccaggttggctgtttattttcaaatggttcagggaaacaaaagctctttttactgtatgtgcgcaactattttgtgaggtttcgattgctgccaattttttgaactgttaaaataaggttaattgggttggatgtggtggctcatgcctgtaatcccagcactttgggaggccaaggctggtggatcacttgaggccaggagttcgagaccagcctggccaacatggtgaaaacccgtctccactaaaaatacaaaaaaattagctgggcatggtggcaaatgcctgtaatcccagctacttgggaggctgaggcttgtaaaaagtaaaatagaggttcttctttaaagactttcctccccatctagttaaaaataaatagtaacttcttttagaagcaaaatttattcaaagacctgtgctaacattcttaaatatctgctagccataataaaaaaatcaacatactttatattcttagctcccacaatttaacctaaatatttgccttgcatacttatactagtccaagcaagcactaagtcatagtctggtcctcttccttctttaaaagcatttttacctttctcaacattccacaagttacttcctccttcctttattctcctctgcatttgcctcttttaaaaaattctaagttactaaccaatcaaaacaaatacaaaatgtaaaatcccgttccagccaataaaaaccagacacatcagtaaggtggacacgtcaggttataaatgaccctgtctcctttattcaatatactctcataacaaaactgctggcaagtacaccctttctacagaaaataaaaaatggcctcgctaaaaaaaattaaatttatattcaagtaatattgctttacgacaccaggaaacaaacatttcaaacaattttggtgacccgtatggggatacattctctgccgggggtggtctccagtccctcctcataagggagcgtgctcctctgccacattgcagtggcctcaaggataagagctcaaaacccacccggtatgtggaataaactcagagtctcagcaatgcaaaaaaaaaacaattcctcacatatcacgtgaaccagaaaactgtgcacagattgaggaaaaaacaccaggaaaaaacaccggtaaagtatttccttagtaatcaagactgaggaaaaagctgcggggcagtaaagcattccttagttaaaacataccaaggagagagaaactgcaggggcagtaaaacattccttaggactagacacaaaaagccatgggaggtggtaaaatatttcttagccaggatgtcttaaaggttaaaaaaaggtaaaaaaaatccccactgagtgggggttaaacctcaaaaagaggtgagaaatccccatgggcgggggggttaagcctcaaggtaaaaaatccccattgtcgggggttaaacctcaaaaagaggtgagaaatccccatgggggaggagttgaacctcacacaaacctccgatagtaaaatatatatacatatatatgtatgttacatatagatatacatatatatgtgtgttacatatagatatacatatatatgtgtgttacatatagatatacatatatgtgtgtgttacatatagatatacatatatgtgtgtgttacatatagatatacatatatgtgtgtgttacatatagatatacatatatgtgtgtgttacatatagatatacatatatgtgtgtgttacatatagatatacatatatgtgtgtgttacatatagatatacatatatgtgtgtgttacatatagatatacatatatgtgtgtgttacatatagatatacatatatgtgtgtgttacatatagatatacatatatgtgtgtgttacatatagatatacatatatatgtgttacatatagatatacatatatatgtgtgttacatatagatatacatatatatgtgtgttacatatagatatacatatatatgtgtgttacatatagatatacatatgtatgtgtgttacatatagatatacatatgtatgtgtgttacatatagatatacatatgtatgtgtgttacatatagatatacatatgtgtgttacatatagatatacatatgtatgttacatatagatatacatatgtatgttacatatagatatacatatgtatgttacatatagatatacatatgtatgttacatatagatatacatatatatgtatgttacatatagatatacatgtatgttacatatagatatacatgtatgttacatatagatatacatatgttacatatagatatacatatgttacatatagatatacatatatgttacatatagatatacatatatgttacatatagatatacatatatgttacatatagatatacatatatgttacatatagatatacatatatgttacatatagatatacatatgtatgttacatatagatatacatatgtatgttacatatagatatacatatgtatgttacatatagatatacatatgtatgttacatatagatatacatatgtatgttacatatagatatacatatgtatgttacatatagatatacatatgtatgttacatatagatatacatatgtatgttacatatagatatacatatgtatgttacatatagatatacatatgtatgttacatatagatatacatatgtatgttacatatagatatacatatgtatgttacatatagatatacatatgtatgttacatatagatatacatatatatgtatgttacatatagatatacatacatatatatattcaaaactcccctttcccctcttcttgggggaaaaaaaaaagactaagctccactcctgccagtcgctcctctaggggaaggggaaaaaaaaaagcaaaaacaccaagcatgacgccagacagccaggcacaccaaaaattaagtccctctccccacccgagctctgtgtgaaaaagagagcggggactgtcgcagaaagaaaagccaacaagatgaaaggacctaactcttacgactaacgacaggtgtctgccaagcctgtgggccagtgatggccctgggccaggactgcagccggccgggggccaagactacagccatgcaaatcccacccagcccagaaaactaagtgtagaaaaaataaataaatcagggaaaaaaaaaaaaaacaggggaaacagacggcagcgcatacatgcaggcggggcccgtcccttgcccagcctgcgccgcaagaccgggaaaaaaaaaggaaacaaaaaatgacagagagggagagaaaaataaatgcaaattaaaaaaaaaggaaaataaagtgcaaataagaaaaaaaaatagaaaaaagtaaaaaaataactagaaaagacaaaaatcaaagaaagacacggtaaaattaggaaaagaaataatgtaaaaggcagaacgttaaaacatgttaaaaattgtctataaaagtcataaaaagttataaaaaaaatttatgcaaaaaatattacgtaatttaaaagtaattaggcctcctaaatgtaaaactatttaaaaaacagtttatacagtttatatacaaaatatgtaaaaatatatacttttaataaaattacaaaaagacataaaaatatgaatttttacctacattaaaaggttaaaaaaattttgttttaaaactttaaacaaggctgggcgtggtggctcatgcctataatttcagcactttgggaggccaaggcaggcggtcacgaggtcaggagatcaagaccatcctggctaacatggtgaaaccccatctctactaaaaatacaaaaaaaatagccgggcatggaggcaggcacctgtagtcccagctactcgggaggctgaggcaaaagaatggcgtgaacccaggaggtggaatttgcggtgagctgagatcgcaccactgcactccagcctgggcaacagagcaagactccgtctccaaaaaaaaaagtttaaacaaatttaaaaatattaattataaagaaaattctgtatgtaaacatattagctaaagaggtatccaatttttctgtaaactaaacattaaaataaaagcacaataaatttttcttaaagcactaacctgctctttaagaaaaattataaaaagttttaaaaagtctataaaaaccttaccttatagtcagacattaaaagtaaataatgtcttcaaaattttattaaaataaagtttaacattaatagcacattaatgttaaaaaacataaaatcatacaaaaagcattatcaaatataaaatagtgcttaactttctcaaagcccgagggcggccgaataagtcacaaggcccctcatccccaaggccacaacgcgcaggggcggtgaaggccacaaaaaagccaagaccttaagagggggcagggccacaatgtcccctaggcaacgctaagcagaaatggagcagaagacgtcaccatggggcctcaagccccagaatacgcaacaaaaattatatacgtaatttatcttccactttccctttcctcaaaactaaaaatcttttaacacaggtaccaaccctaaaatttctagtacatcagcaccagcctacaaaccacattcttgcctggcgcagtgcctcacgcctgtaatcccagcactttgagaggctgaggcaggcggatcatgaggtcaggagatcaagaccatcctggctaacacagtgaaaccccgtctctactaaaaatacaaaaagaaattagccgagcgtggtggcgggcgcctgtagtcccagctactggggaggctgaggcgggagaatggtgtgaacccaggaggcggagcttgcagtgagcggagatcggcgccactgcactccagcctgggtgacagagcaagactccgtctcaaaacaaaacaaaaacacatccttatcaaaaaataaaaaactcaagccagcctgggaaggaccctattttatgctgttaaccactaagacccctgtccacacagccaagaaaaaaaggacccactatactcaaatcaagaaaacatcttaggttactatactaaaatcaagccctactaagttaaaattttaaaaagcttaattttcatatactttctctattacttcctttcctttccttattctgttatagctcccttgttattaatgtaactaaatctaactcacctcaaaccattgcctttaatgcttgctctatcataccttgtaaaaatattaaaaaatcaatgacagctagccttttcacacaaatatttatgtcctggccctctaattaacacaattacccctaacacttattgttataatcacctgcagccaaaacgccaattttctgctcctactgagaggtgaagccagctggacttcctgggttgagtggggacttggagaacttttctgtcttacaagaggattgtaaaatgcaccaatcagcactctgtagctaggactgtaaaacacaccaatcagtgctctgtaaaacgcaccaatcagcagaatcctaaaagtagccagtgacagggaagattgaaaaaaggacattctgataggacagaaatggaacatgggaggggccaataagggaataaaagcttgccacccccgccccccagccagcagcggcagcaacctgctcgggtcctgttccatggtttagaacctttgttctttctctctccacaataaatcttgctgctgctcactctttgggtccgtgccacacttaagaggtgtaacacgcgacttcattcttgaagtcagtgagaccacaaagccactggaaggaaccaactccggatacactacagcctaacaaccttataataaatggaacgacgtcctttaaattactcaagagcaaagttaaacttccacacacacacaaaaaaaacatacagatctaaaacccttcatctatttcattaaaaaacctacccaaccttctcaatataaccctgtccttctgtcaccacctccaccttaactaactctaaacctacccttaatcacttctataatatagaaatttgacataaatttttaaaaaccctaaatatttttaaaatacacattattcccccatcttccccttcttcagtagcctaagttctaaatccgacaccagttactcctgcatctaataaaagtagaatgcctattataaaaataaaaaattaaagacagaccttagccatcaaaacaatacatcaaaatacaaatgcctagctaaaatattccattcacactttaaaaacaattattacactattacatttgtacacatggtactccagaggcccaaattatcccctttccacttaaatggtcacctcatcaaccaaatataaactatatagtagctctttttcaaaatcccactgcttaaaataatccatcatgccaagctctctctgctatttcctaaaatttaacactgtgcgggtcagcccctgaggacaatccagcttgcaccttttctaaatgccaaacttacactgtgcctctcatggcaagaaaaaaatttaatattccttaaaagcatttaaaaaatgctttttccaaaagctcgcccatcaatccatgcttagccatccccaagcaaatatatggtagtactgtaaaggacctttactaaacgctgtgccaaatatttgaaacagtactaatccagttagctgtccttcactctagcatttcatcaatctaaaaaaataaaaacaaaacaccgcaggccaaaaaaaattccttgtaagtcctttaatcctcaagtttatataaatgctattaaaatcctgtaaaaaaaatttcaaataaatttaaaatacaaaatcaaatagctgcaaaatttaagtccacgttattctggtaagtatgaatttaaaaaatgtaaactaaactgtatctgttacaatcagcaacaattcataaattacactgaaaacgccatcaaaaaaatagctaagcaattaggacctaccagacaaattgccttaaaaaaagctttaaatataatatcagcaaaaaaaaaaagtcataattaaaactcaatattgtacctttattcctaatactgcccctaacaaaactataacaaaagcactacaaaaattaacagcactatccaataaacttgccaaaaattctaaaataaataaccctttttctaaaataataaaacattaattcgataagtaaaaaaaaaaattgtggccaggcatggtggctcacgtctgtaatcccagcactttgggaggccgaggcaggtggatcacgaggtcaggagatcaagaccatcctggctaacacgtctctactaaaaatacaaaaaattagccgggcgtggtggcgggcgcctgtagtcccagctaccagggaggctgaggcaggagaatggcgtgaacccgggaggtggagcttgcagtgagccgagatcatgccactgcactccagcctgggcgacagagtgagactccacctcaaaaaaaaaaaaaaaaaaattaacttcaattctcaccttgttcgctcttattaatatacttataagctattatgttattccctgccttcaaaattttatacaaaaacttatctctaccactcttacaaagttaactcctaactctcctccaccctattcgaaaaattacttctcttaaagctattaaaacagacaaattaaaaaaaaattataagagggagaattgtaaaaagtaaaatagagttttctcttcaaagcctttcctccccatctaattaaaaataaatagtaacttctcttagaagcaaaatttattcaaagacctgtgctaagattcttaaatatctgctagccataataaaaaaatcagtatactttatattcttagctcccacaatttagcctaaatatttgccctagcatacttatactagtccaagaaagcagtaagtcacatcctgttcctcttccttatttaaaagtatttttacctttctcaacattccttcctttattctcctctgcgtttgcctcttttaaaaaattcaaagttactaaccaatcaaaacaaatacaaaatgtaaaatcccattccacccaataaaaactggacacagcaataaggtggacatgtcaggttataaataaccttatctcctttattcaatatactctcataacaaaactgcgagcaagtataccctttctacaaaaaatataaaaatagccttactaaaaaaatttatattcaagtgctatttctttacaccaccagaaaacaaacatttcaagcaggttgcattgagctgagataacgccactgcactccaggctgggtaacaaagcaagactctgtctcaaaaaaaaaaaggtaaattgagtcataagaaaaagaaaaaacatgggtagtatgtaaccaaaattccacaggtgatggtaatgcattccctaggattcacaccctgcattctggaagtcccaggtggctgggaactgtgcccatgaacccatgaagctctttccccaggccatgccaggggccacatttgccagccctggccccacctgctgccgtcagctaattctgagcattcctcaaacactcaggaacaagtctgagagccacctctggggagtcttggctggtgctgtcatctcagctggcaggcactgcaggtgcagccgaggctccataacgctgtgagctctggctgtcctctcaacgtgcacctcccttttgggtggccttgctatggggggacatcgaggctgccaccttctgcccgaacgtcttagggtttgagtggaagcattcttgagcctgcggtttccctgatcctcagacgtgagcctgggcatggtcagggagggtctgggccacctgggctgcacattcacatcgcatcccctccagctctggattgaaatccagacagccttctcactgttctcctccattggggtgagtgtcttctagaaggctcctcagatcttggtggtaatgaccccaccagcccatcagatgtgcccagggaacccctgggtccctgagagaaataaacaggagaggaacccctccatccctctggcccccactgcttccttgtgaaacacccccagaaagccaatagccctgctaccacaggctctggtgggctgcctccgcctgcagagagactcgccttcacagcggccggcacccttcacctgcgggctctttccaactcatcttctgagaccgctcccacggtggggtaggggagctgggacctgtgcatttgccatcggcggatggcatgagaagtggcccaggatggcgcagctgccggggtccatgaagataatatccagagtggggagggctcagcccctgcatgaagcagtccccactttctccatcctccaccctgttttagtcagtgaccagctggctctgttttgtttcacagtgtggacaactctgaggaccccgtgtacgagagcctggaagagttccacgtttttgtcctagcccatatattaagaaggcccatcgttgttgtggcagatacaatgttaagagactcaggtggagaaggtaagttcctcaaagagatgtgttgtattcatgacacagaaagcatagcatcccagctagaaagcagatagcacagcacaaggtcgagctcccagaggccacaaagcatcactctgtgcaaagatctcctcgacgtgtttctttctcctccctgatggcagcagagattgttcttgactagctgccctgcctatcaacggcaggtggccaggagaaatctggtcatgtgaggaccaggaccaagcccagaggggctcctgtctcctgtcgtgtgcctagggcatagcagacagcccacacccctccaacagccctgggccatgtcctggaggcactcagtcactcaggtgtgttcccacccctccgcagaccacatgtgtgttaaagactaaaaagaaaggaagacagaatgcatagagtcatttggcaaaagctatggtagaatcagaactggcagagaaagaggcaagggcagtttatggcctgcccaccaaaagccacactctgtgcacagccccttctagaatgttcctccattcagcccttgctacaacctcccagggtggacaccaccctccccactttacagagatgaaactgaagcccagagaggctaggcaatgtccccagcggggatcagccaagggcagggagtgatccaaagcctgtcctccctccagcgtgcagctgcccagtttgaatttacacctgcaccttaacaaaagtcataggtcttccagggagctctacgaatcaggatgtggctcttcacgctaaatcacagctgccataaaaaatctgatgtggccacgatggttatgtagccagggaactggtaggacacaggtcctgcctggcccacccccttccctgtgtggctcagggacgcgggcctgctgaggtctgcaggtctccgtgcaacaccagggcttgcatcagggcactgctgcgtaagcccaggactgagctcccagcaccatcagatctctgagttgcggggcagaggaaggtccacgcttcctaccatgctactcacagccctcttgcaggtacccccaccctgtcgcctctcagtctgactctcctgtgagcacagtgatcaatttagacaaagtgaggatggcggaggaactcataagagttcatcaaagacatccctgaaattaccgtccctgaattctgctcaaggagtgcagcaatacactcactctagggccaaaagtaaagacgtttcatgacctcaaagcagatgctgctttaggacagatatttccagaagttattctattttgctgagggtgttaggcttttctgccctctttttttacaagtaagaaaatgagtgaaattgtgtccctgtcactgaaggacttgatccctctgattctcagttcccatctgacttacatcttggtcctggagctctctgactggttccttcaaattcaatagaagaggttctcaaaacatagagcaaatatacacccttgagaagcgcacatactctgttgtatacaaatgctttaccaaacactaggaaaggaagaagtacatccagaaaaaggtgggcttccaggctgcaactgctctgaccaatctcgggtgactgtcatcccagccctggggctcctgtacacctgtgcaggtctcagggcagcaggagtcctggggcagacagatgactctggaaaccctcagccccatccctcagcaccgcctccatccacccctcctgtccctccgcttctccacggagtccccccggggtagtgagggacagggatgcaggggcctcccctcccagctcgagctggctgctcctcacaccctcaccctggtttgtgtccacagcgttcgcacccatcccattcggagggatctacctgcccttggaggtccctcccaacagatgccactgctcgcctctggttctggcctatgatcaagcccatttctctgcccttgtgtccatggaacagagagaccagcaaagagaacaaggtatgcctgtctcccaagagagtgcacgcaggagcctagggtgggggcagagccatcagaagggaccccattgcacggggaggtggattgtggagacccccccttagaagcacacctgtgcacactcagcagtgacagtttttgcataaagctaccttatgcatgtgtgaacgttttcattgaaaataacaatgttaaagacaacattctctttaaaatactaaacaaaggcaacctacccttaaatagcttttactgttttccctttcacatgtatacatattttataggaatgcaattagtcttagatataaattaaagggaaaaaaacttcaaaagcaagtattaatgaactatggcccaccacccattttataaataaagttttattggaacagagccacattcattcacagatgcatcatctgtggccgtttttgcactacagtggtagagagaggagcagccacagacaccaaggcctgcagcgcctaaaatatttacttactaattagctatttatgggaagagtttgctcacccctgctccagggtaagcttttaactcaaaaggtcaacatttcctttcaaagcattgcagctgagtttcctctaagcagccatttcagtgctgctgatgttgggccagcccacaggctgtgcactgcacaattccagggcaccagtcaatgtctttactggggaaatagggggattttgtttggaacaattgctgttttctcatgttagctactgatggatgtgtgaccagctgagtggagaggaaaccccttcctgttgtcattcttgtttgtagtataggcagagactcactcccccaggggacagacggacaggcaagaccaactatttcagagtccctgccattaggtatggtcccagagaatgggaagtgccctgtccagggccaacagggggaaggaagctcaggggtgtctgcttctgaccttttccactgagtgtgcagctcaggaagtaaatatagcaacaagattgcacccctaggactcccaaatgctactccttcctgtagacagctgggaaggaaaggacacagacaaatgaacagaacccagcctcccccagccctccgccagaggcggcaccagcgtgtcacttcctggcctggcagttgagtcgggaatgaggctggggctgtggagcagaagctgaaggtgagaaatgcacagggcatttgagaccccttcccaagagcagatgcagagctcccaggagctgacatgcgtggtgcagccgcagaacccaagtcacaggaagagagacgactggaggctacagccggccgtgacaagaatgtcacatcatggttctttattatttgcagatgtggcactggccacagaaggaaagatttaatcagtaaggcctcggaggtgctccggtctttccattgtctccccactttcaatccggaatgcggaatgcctgcacctccttcccggggatttagctcttcgtagggctgaccccgcctcttgggagaccagaagggccttttcaggacctgggatcggccaggggcggggccctctgtccagtccccagggagattctgtggtcagaaggtgatggtcccaaggccagcgtctcccagttccgagcatggggttcagatacccgaccccctcctcgcaaaaggcaccgagtactcttccaggccttccagatactgctgcttggtgttttcaaggcacatatgaaagcatcctcccttcaaaggatgcccatggagggcgctgtggcttgggacctttcaggagggccttgcagagttgtgggtggtttcacttctgatgacctggtttctaaaaactgggatctggtcccagtgcacctctcagagccactgtggtgtgggtctttggctccctcacagtcaaagcagcccactgggatcctcctggggcgatgcaggtccctgcctctaagaccatcctgtggccaggctgcacattcacccataaggtccccacgacccactgcagggcaggtgccatggccacgctctttgtcacctgcacccttgtgcccccttagaccttcacctctgcagccttccctctgtgcctcaaaggacactgtggggacgggacagagtcccagctgtgctctcaagtcacacgacatctcagcagagagggacgtggaaatcacagtgaggctgcagcttccaggatgagctgcagactcaggcctgctggagtgagctggccagaccgcaaagtcgcaggacctggtgggaggcaggagatgggagactccagaatatcgagccccaggatgccaccggcccccactgtgaagcacaggtgtcaccctctgccatggtaccctgtccgtcctataaacagcaccctgtgacagaggctaatagatacaataatcacaagccccaggaagagcagacaccgcatccttgtgcctgcggaacgatgctttgagagcctggaaatgagataaaaaatgtatttcaggctgagacaaggctcccttcttcccaccacccacttcctcctcctctgtttacatgccccatcatgtctcatccacatgtgtccagctcctggaggcttaaaaatccatgaagcattctttaaacttctcatcgagtgcctctccctctaagggaagccccctcttataggtgctactgccgtggcccggctactgctgatgccgccactgaccatcttcaagttcaggaatcctcccatttcccaggctaggcatgcaacatggggagagggaagggcttgaggtggaaggtcaggagctggtgggactggtcagctatgggcaacctcagtggcccaggctttgcaaatttatcttaggactttttagataaaatgtatgcattctttcttggtagcttccacacatgatggtcacctgctttctcctggggaggacattagtcatttgctccctgacaacctgagccttgggccttcagctttttgcaggaagcagcctccttgcagccacatcttaaaatggcctgcaggggagctctgtgaaacccagatctgggcattctctcagcacccagctcaggtcagttcctactggccactgagcaaatgtgtacattatgaaaaatcaaatcaattaacaggagaagcagaggtgccgcatagttcctggaaacatagaacctaggaaagaactttggaatcatccagtgcaacaatcccaactcccctccttttatagcaaacattgtccagtgtactcttcattaccctgaaatgaaattcatggataatgttacctgtgttggaataaagtccatttagtacccccacatcaggagaaatcaaaggaaaccaatgtaataaaataatctgcatttctgtaaatattctcacacagccatactgcaaaactcaatgaagcaatcagatcctggcacccatatgtggggtgcccagttacacagagaggggacacaggtgtgctgagcataccctcaaataccccaggaggctctacagtccaaaatggcagctaactcttggtaaagtcccaaacaagccaagcacagccttgcccatctccacagctcctcttccctttgggtggatatagagccgtgcagagcatacccatgtgtacatgttagctctcggcctggccagcaggttgcactgggaagggctgggtgcatacaggtgctgcctaggtctgcaccccaccttcatgctcatatatttgcaggtgcttcctgtgctcaagggctgttctaggtcctttccaggaatacctatttaacccttcccatttcctcttccccactttacagagggggaaattgagaaaggaggaaccatccccagggaatagttgcagccagtgaagggttgggagggtggatggcgaggcttccacaaagacttggcccaagagagtggcatctccaagagaagaggctcaggaagtggtaccccaagtcaaagcctgcttgggataagatagcgtctcagacccaggactcaggaaccttcagggtcgaagagggtagggagggggtgctttgtttcatggaaggtgtcaatgccatctgtggctattcttttcttaaaaattaatatttattggccaggcacagtggctcacacctgtaatctcagcactttgggaggccgaggtgggtgggttgcctgagctcaggagttcaagaccagtctgggcaacatggtgaaaccccatctctactaaaatataaaaaattatctgggcatggcagcatgtgcctgtaatcccagctactcaggaggctgtgacaggagaatctcttgaacctgggaggtggaggttgcagtgagccaagcttgcgtcactgcactccaacctggatgacagagtgagacttcatctcaaaaaaaaaaaaattaacatataagtcaattatttaaatagtttttccctcatatatacaaacagcctgtgagcctctgaggcatatccaggggccacacagaggtcagggcaccctcagtgtgtcctcagtgccttcccccaagggtcccacttaaggaacctagagagcagcacacaggagccctgagggagtccactggttacagatggagggggagatgctggtgtgaacagagagctctgaaacggctgcagactgcaaggatcgaggcttacagatgatcacaccaaggttggccatccctttattgggaacagagactcaacacattcaaaatgtgatacttgaaaaaaaaaaagtttttgcaaagagcagcttaccaatttgtctcttgctgcttagaaacaacacagcaagtttataagtgtctgctagggatcttgggagccaaacagagtacttctacccaccgggccatggaagcagccttccatctgtatttgatgtatggctcgtggttaaatcaaatgctcacctatgctctactattccccaagccacacggaatgtaacattccagttttcaatatgtttgacaatgaaccatgctttttcttgcaggattaatttataataaacagatccaatctctttttaaatagaaatgtatctttacatgttacaagtatcattacatattctgctcaacttgattttaaaattgtgttaaagaatcatttatcggcggggcgcggtggctcatgcctgtaatcccagcacattgggaggctgaggcaggcggatcacgaggtcaggagatcaagaccatcctggctaacatggtgaaaccccgtctctactaaaaaatacaaaaaattaactgggcatggtggcaggtgcctgtagtcccagctacgcaggaggctgaggcaggagaatggcatgaaccagggaggcagagcttgcagtgagccaagatcgtgccactgcactccagcctgggcgacagagcgagactccatctcaaaaaaaaaaaaaatcatttatcaaataccaatcaaattggtctatttgtgtacctatctgaataaaataatggaggaagtatgtaatgcctattacaagacattacggtaagaatcagcttagttcatggtggcaagaaagtttttttttttgaaacttttttttttttttttgagatggggtttcattctgtcacccaggctggagtacagtgccatgatcttggctcattgcaacctccacctcccaggctcaacagatcctcccatctcagcctcccgagtaggtgggactacaggcacatgccacaagcccagctaactttctgtacttttggtacagacggtgtttctccatgttgcccaggctggtctcaaactcctgagctcaagtgatctgtccacctcagcctcccaaagtactgggattacaggtgtgagccactacgcccggccagcaagaaggttttggaaaccagaagtgcccccaaactgaattacgtttgtaattagtctcccttctcttggctactttctaagtttgtcagttgccactgaaagatagggtcagagtgggagtaaaaagcacagctacgcctacccttgtggtgtgtggccagtctcactgggccatatttctttgccactcctctcaggagccccagagcacagaaccctgaagaacctttgtctgcaaaggcccctggctaaggggtgagaggccgaggagctggggttgggggcatccagacttttagctgagacctttgtttctcaagtctgtcatctttgacactgttgacctacagatcacaaagcaccatgaggtggccaggagctatggaagggacttcatggctatggagctctgtcttcagcttatagagtgggcaggtgcccagagagctgagtaacgctgattaaaagcacgaggtgtgtttatccacaatacatctgctgattggttcatgccctaccccaatgaccatcaactcagggacccaaagcactgttccaaagggatgccagccacagttaactccacggaaagaactggctgagggtttttcagtcatgcctgaaggcctggagagaagagaaagcaagagtgcacccagatgccagcctcccctcaggagccctgcctgtcccctcctgagctacaaattaggcacagacacctggatcccccaccagacctccccaagacgtccatgcccacaggaagcgcataccagccaccatcgcccctgattcccaaatgagggccccagccatctctgtgtgatgtgcagtttcctccatctggccactccaggctcctgaggactccatgctcccatgcatggtactggagtgagaacatgtgctccaacaaaaccgcttctgagaggggctgggaggcagcagcaccagccacctgtcctacctgcaggacaggagcagccagcactcactgccctggatgtggggagtgagtttttggtgggccagggtgacatcctggttctgctctctgaggagaccccagttgtcattgtcccacagggccacatctgatgtgtgcacagagtgcaccctctggggctgagagcttcaccacccacttttggcatgagttcaggagcccagaaattgtgttagatgctgaacgctctctcagcctgagagttttttcagcagtacagtttccttaattctggtcagcactttttccagttttgtcttagtcaattcaggctgctgccacagaataccatagactgggtggcttataaacaatagaaatttatttctgatagttctggaagctgggaatacaagatccaggagccagcagatttggagtctggtaagggtgtcctcctcctggtctacacacagccactttttactgtgtcctcacgtggccaagagagagaaagaagagcgctctcgtgcctgttgttataaaggcactaatcccattctcaaggactccatcctcatgccttaatcacctcccaaagaccacacttctaatactcttacatggagactaagctttaacagtgaatgttggaggaacacaaatattcagtcaatagcaagcttagtctatagaccaatgaccaatccaaatatcttatctacatataaactttaggccagagaatgtatgtctgccaccattggccctgatgccccagcctaggggcccgatcctcaggggctggccttggcctcacgtacaggctatcattacttccctcctccctctctgctttgagtttaatttgctaccccttttctagtttcttaaggcagaaattttgattactaatttgagactgttttctcatctaatatgagcattttaatgctataacttttcccctaagtactgctgtaactacaccatacaaattttgatgtgctatatttgcattttcattccgttcaaactattcgttaatttcccatgagacttcctctgacttatggattatttagaaacaggctgtttgagtttcaagttttgggggattgttcaaatattcgttactggtttatagtttcagttatgacatgagcacaaacatcatgatttctgttctttttaatgcactcagactggctaagaatatgttctgtgttggtgaatattccatatgtatttgaaaataatatatactctgctcttgttaggttctagaaatgtcaattacctcaaattctctgagagtgcagctcagttcttctatatccttactggtttctgcctacttgctctgtcagttactgagcaaaaagtagcaaagtctgcagctgtaatacatttgtttatttctctcatttttgttagtatttgcttcatgtactttgaagctatgttgttagcatgcatacacataggatgattatggcttcttggaaaattgacccctttagcattatgtaatgttcctctttttctttggtaacagtccatgttgtggagcctactttgacataaatatggctactctagctctctttccattagtgaatatcttttaacctccatatgtctttatatttaaaatgggattctttttcttttttttttttcctacaacctcaacctctcaggttcaagcaattctcctgcctcagcctcccgagtagctaggattacaggcacacactatcatgcccagctaatttttgtatttttagtagagacagggtttcatcatgttggccaggctggtctcgaacccctgacctcaagtgatccacccatctcagcctcccaaagtgctgggcatgagccacagtgcctggcccttacaatgagattcttgtagacagcatatatgtgggttttgctttttcatccagtctgacaattttatcttttaaaagatacgttttgaccattttcatttaatagtattaatgatatgtttggattaaaatccaccatcttgctacctgttttctatgtactgtatgagttcttttttccttttgtttctcttttgctatcttatcttgggtaaattgagctttttaatggttccgttttatttccactatggacctgttatacccctatttttaattgttagtggtttccctagggtttgcaataaacatctttaattaatgagatttgtttttttttttttttttgagacagagtctcactctgtcactcaggctggagtgcagtggcatgatcttgcaggctctcactgcagcctccgcctcctgggttcaagcgattctcctgcctctgcctccagagtagctggattacaggcacacagcaccatgcccagctaatttttgtatttttagtagagatggggtttcaccatgttggccaggctgatcttgaactcctgacctcaagtgatccaaccaccttggcctcccaaagtgttggaattacaggtgtgagccaccacacctggtctaattaatgagattctattttaagtaatattacttgacttcacatgttgtataaggatattacaacagtgtattaccaatccctccctcccattctttgctattatcagacattttatttttacatctgttataaattcataatgcactgctgccctttgctttagacagttatctgttagagcaattaaaaagaagaaaaaaatgaattttcacatccatttattccatttccatcactcttaattgtgtaaatacaagtttctactggtaccatatttcttgcactttaacatctcctgtagttcaggtctgctggcaatgatttgctcacttttatttgaaaaactctttatgtcttcttcatgtttcagagatattttggctgggtatagaattctagattaacagtttttttttttctttcagcactttaaaaatgtcactccattatcttctggcttacctgttttaccatgaaaagtctgttgtaatttgtacctttgtttttctctgtataatgtatcctcttttttctctggctgccttcaagactttctttttgtctttgggtttcagaagtgttaagaggctattataggaatatttgtggtggtgttactttttcttcttgatgttctcttagtttcttagatctgtgttgatggttgtcattaattttgaaaaattcttagccattatttctttaaaattttattttgcattgttctttccctcttctgggatttcatttacacagaacttaaggtgctgatattgtcacacagctcttagatgctgtgttcagtttcccacctcctttttttctgtttcagtttgtgtcatttctagtaacctatcttgaggtttacagatcagattctttgctcagctatatcaagtcaactgaccagcccctcaaaatcattcttcacctctattatggtgtttttcatttctagcattttcatttctttctcatagatttgttctgtatgctgaaattaaccatcaaatcttgcatggtatctggcttttctattagtccttaacttattaatcagttatttttaattccttgtctgatagtttcaacacctgtgtcatatctgagtcttgttctataaactgctttgtcttttatcaatgtgttgggtttttttttttatctttcctttcgcctcataggttttttgttgtcgttgctgaaagccaggcatcttgagtaggacagtaaagactgcagtaaatcacttttattcctggaaagaagcatgcctttccttttgctaggttttcagagtctaggtttggaccagtctagttatgatagcccaggaaggtcacccccatccccagatccagggatacagtgcctgcctaagacagatgcttaatcagagtaacagaagatgacccttagtgcacccagtgtttgttgccctacactctgcagtttaagcttttattccttggtagaggtaggatggaaatatctatggagacactctcttagaactcctgccagtcttttttgggagaaccaggtaggtcctgtggagaggagcctgcaggtgcatgtgaatttcctttatatcttcagcccccagggttccatattatttcactagctgatactgttcctttaccaatttaaccattttagctgaatgattcttactggggtccagctgaattggcccttcttaagctcatgtctgtctctccttggaggcacctgtctttccttagatattggataagtcggtttccctgtgacttcagctgtctggtgggttaaagataagttgtgaatttgcagtttgactggaatgttttcatggtggaacaatgctcttccagcttttcacatcggagacaaaaaccagaaatcttgatttttttttagaaaataagtactcagaatatattcaggctagcatgagatgatgcctatatgtttccaggctaaaagacatacaagaggcctttcaaaaacaaaaacaaaacacctttccggcctttttaggctcattttgaaaagcagttgctgttctagacatttaccaccagagggcaagccgctgcatggctgctcctcactggtaaagccaggtttccaatagggaaatgtcagggtgtacagttgagaagcagaggcatcctgagcagccgctgctcacgaggaggacctgttttcatggcctcctggccggaactgtccctgggctctgcagccccagccctcaccacaggccgcagttgaccctctgcagaaaagccttcctttgagcccctcggtgtcttcagttgtgagcaggcatgtccgtagagcctctcagtacctggcccttcaccccagccagatctaggccgcaaggctgctggacccttctaggtggacaggcactagccccttcaggggtattcccaccgtgcactggagccctgggcagcccaaggagtccattccagccctgctgttgaggggaggagtccccaggaaccccatgatagggaagtgagggtgactgtctggggtgccgtcttagcttaggtggtttatctgaaacaaacaaaccaaaatcacagtgacttaacacagtggaaatctaaaaggagtgttctcaattgtcaggcagctcttcagtggagatctgctgtcttctgcaggcaccatggaaggggagtggggagagacacccccatgcctgagcacatcacccagcacttcccacattgcttctgcccacagaccatggatgccactaggtgcctgttccccctaaatcctggggccggggtggctaagacatggagtggtggctgggctgatgttctccaacagcaattctaccctgggaagcgggtggacagccagacccaaaatgtccaagttgcacccacaggaactgcttctaacagattattcttgttctagaacaatatttcctgaatttgcttgattttaaaagccacaggagatgcttatttaaaatgttgctttttgagtccctttcctggacactttggtttggcccatccattcatgggggcttggaactcccaggagctgcactgctctattctgggaaacattgtggatggggagagcctgtgccaccccctgccccatgagtaagaagcgaggctaaccccttctctgtttgtgtagtgactcatagaactatgggacaggctgctgggcaccacccaagggagacctgtccctgagccagccctgcagccctccctgggtgtgtctgccctgcagctcagatctggaaagggtggccacgtcaaggcagaacccagcaggctgcagcaaagccaggccaagccacccctgacctctcaaatcagagcactgcactttccaatcccaagccagattaatgaaaagcccggagctggtcattggtcagcaaagctgcatttcccttattggcagcttggggaagctggagaagaagaggtgcgggggtggagaggggaattatttgcacccacttttcctcttaagcaacactggagggcagcattgagtcagtttttccaatttcttaccaaatcaactattggtgttcagtcttcgatttgatctatttccttgcctttttgttcttgccatggcacccttgccatgaaccatgggcaccagcaaagaggcaaagcagctggtccaaggtggctgtgcttctctgctgtgtgtgactcccaggtgtggggcctgcaggggagctaagtggagcccatggaggaggctgctgcttgttgcgaggaaagacttggggagaccatctcccagttcctcctgcccttgtccctgacaatgcccttgggaggagtcaaccgtgtcactaggcactcctctcatcaggtcccccagcagctcagaagctcctagaagatcccaaacctgtagataccccctccaccctagcccttctggagtgagccaggatttcccacgggtggtgagtttcaccacagaagttttgtgatgagtcaatccctctgagaaatgaccagccagtggctcatcactgcaatctccacctacatgtgacctcctcaaaaggaccccctgaccccatccgaaaaaggcttcaccatcactgccttctgcctggtgtttacccttccagggctcatcaccacctgacattatgagatgtttgttaacctgcttatctgtccccagcacaggtgagcttcccacgggcaggggcgggtgggtccatgggtcccaggcactgatacagacttgtggcacaaaattacaaaccagtagaggtcagcaacacccttgctcacctgacttgcacattcggcccttctctgggacgagacaggagagctgagccccaggcccacctgcaaggtggcctcccaaagtgtgcctaacctgcctagatccttcctagaaatagcagaggcagcaatagcttttttcccattctgctgcccaatggagtatctgccattggacagacccaaagagagccagggtccaggtgacgcttccaactgctctccactgtccgcaataaatacgaaattttaaaaactagcaatagtggttttggtcttcatgctcctgctggcacagatctgtgtagatgtccactcggtgcatttgtcacccagatacctggcttgggaatttccttgccatcctgcctggggactgccggggctccaagcacggctctgtctcttctgttccagccgtgatccccctgacggattctgagcacaagctgctgcctctgcactttgcagtggaccctggcaaggactgggagtgggggaaagacgacaacgataacgcccggctggcccagtaagatcctactctgtccctttccccagcgcccacagggagggctatggctggggcatcctggggagggaatgtaccacccctgctcctcctgggacagctggcatgcaagtggactgggtgctataagggccagctcagaccatttcaataggatattcttctcttgccagccttatcctgtcgctagaagccaagctgaaccttctgcacagctacatgaacgtgacgtggatccggatcccctccgagacacgggtgagcctggctgtgctgggaccagacctggcagcagggtccaggctgctcagctccagtctgaccagggtgcatcctcccaaatgctcccacactcttgcctgcccctgcccggccgcccaccccagccatacccacagcccagtagctcctccacctcctttgacctagccatcccagctgcatgcagctggggccaccctggctatggcttgaagtggctctggctggacctagtggctgtgtacacacatgtaggcatgtgtgcatgcaagcatgcgctcttgtaaagggattttttgtccccctattttctgcagaaggaatcaacacgcccactcagaaaacaagccacaggcaagtcacaacacaaaactatctgctaagatcagaacacaatgtgctgccgcagagcggaattaattacaaaccgtgtgggtcctcaaaaaaagccagggaactgagagcgcgattcctcggcgcccccttcctcccctcccagaggcagcacactggtgggtggagctggcaggaaggtgaggagaggggcctacgccccatgaggctgcctgcctccagagggtccggggctgcccctgcttgcaaacgctgagggattcattttaagcatctgactgattgatgttttttgaaatctcagtagtgaactgccagggaaaaggatttgtaaaaaacagcctgcaagtaattggtcctctccagacatttacttaaagtggggctcacaaagaattagtaaaggagtggcatgagtcaaggagtcgggcggtggccagcactgctcagtgctctcagactccagcctctgcctgtacgtcatctcccagggctccatgaggcagggactgataccccattttactgatggcataagtgacagccagtcggtggcagtttgagtcctgcgtctcaaaggcctggagcactcccgtagtgctgtggctgttcttcttcagcacccacatggggagtgatggcagtggctcgagatgtagaatcaggaggctctcgggctgagaatagctctgcctgcaattgccaggcctcggtgccttcatgttagatgcagggctctcagcagacaactgtgggaagggtccttccagccagggactcctgagcccgctctcagtgcgctcctgctagcaccaggcgcacctcccttcctggcccagcccgagtgtccaccctttagtgtctcacgcaccagtctgagacacttcacaccttcctatcccaggtgggaaggggaaaggaatgtcagagtgggaggtggtgagggtcagttctgcccacctttgctttggggtgacctggtcacaggagagtcaccgactcttgaacttgcttgaagggtttgagggggggacaaaaattaagtgggagagcaatgggccttctcccaggctcatcccctggaagccagggacgcctgttcaggtatgagcaccagttcctgcagcacccagcggccagcatgatgggccctgcctctcgtccaatgacactcggtcagaattctctcctcacccagggaggtccctacagagtagtagtaggtgctgcctgcctctctgctctcccacctcttttctcagggtccccccaccccagatatggtcgtgcccccctcagactggttgacctcatcagtgggtctcatccaagaagtgctccccagcgtcaccccaccccacccagggggacttttctgggaatgggaacatcttttttgctgagcgcaggcctatttcagaatcctcctcaatttagcattccaccttgccaaactgagtgagaaaggaactcctgaagcgatttggcatccctgaatcaagggggtgtttgatccaagatccgatgaatgaggttgagtgcaaggtttctgtcccatgcctggcgtgaggtgagacatcttttcagaggaggcacttttgtgcaggcccagtgtcctccccacctgaaggcctccatccttacagaggccagcctgggacctgtgtctggtcaagcaggcggccttgccagtgggggaaggccagagtctgaacctgaccgttctaaattgtgacaaggctctggggaccaagaccaagtagggtatctgcaccctgctgcaataccctactcagggttccagggtaccaagtacctgaggtcccccagagagaaagaatgagtacaccccagcttccctggccagaagacacacgcagttaagaggtccctacatccttttactaccgcagcagatcagagcccactcctatccgctccttcagcaccgcccatccggatgtcacagtcaccagagcgacagtggggactgggacagtgaaggtccagggccctagcctcggcaacacaggggcaaggtgtgtcttcctcgctggcgcgtggacagctcttctctaaccaccttcgatccggccctccctctccacacaggcgcccctggcacagccggagtctcccacggcctcggcaggggaggacgtgcagtccctggccgactcgctggactcggaccgcgattcggtgtgcagcaattctaacagcaataacggcaagaacggcaaggacaaggagaaggagaagcagcgcaaggagaaggacaagacgcgcgccgactccgtggccaacaagctgggcagcttcagcaagacgctgggcatcaagctgaagaaaaacatgggcggcctcggcggcctggtgcacggcaagatgggccgcgccaactccgccaatggcaagaacggggactcggccgagcggggcaaggagaagaaggccaagtcgcgcaagggcagcaaggaggagtctggtgcgtcggccagcacgtcgccgtcggaaaagaccacgccgtcgcccacagacaaggcagcgggcgcgtcgccggcggagaagggcggtgggccgcggggcgacgcctggaagtacagcacggatgtgaagctgagcctcaacatcctgcgcgccgccatgcagggggagcgcaagttcatcttcgccggcctgctgctcaccagccaccggcaccagttccacgaggagatgatcggctactacctgacgagcgcgcaggagcgcttcagcgccgagcaggagcagcggcgccgcgacgccgctactgcggccgccgctgccgccgccgccgccgccgccacggccaagcggccgccgcgcagaccggagacggagggcgtgccggtcccggagcgcgcctctccgggcccacccacgcagctggtgctcaagctcaaggagcggccgagccccgggcccgcggcagggcgtgcggcgcgggcggcggcgggcggcacggcctccccggggggaggcgcgcggcgtgcgagcgccagcggaccagtgcctggccgcagccccccggcgccagcgcgccagagcgtcatccacgtgcaggcgtcgggcgcgcgggacgaggcgtgcgcgccggccgtgggggcgctgcggccgtgcgccacgtacccgcagcagaaccgctcgctgtcgtcgcagagctacagcccggcgcgcgccgccgccctgcgcaccgtcaacacggtcgagtcgctggcgcgcgcggtgcccggggccctaccgggcgcggcggggacggcgggggcggccgagcacaagtcgcagacctacaccaacggcttcggcgccctgcgcgacggcctggagttcgccgacgccgacgcgccgaccgcgcgctcgaacggtgagtgcggccgtggcggcccggggccggtgcagcggcgctgccagcgcgagaactgtgcgttctacgggcgcgccgagaccgagcactactgctcctactgctaccgcgaggagctgcggcggcggcgcgaggcgcgcggggcccggccctgagcggcgcggcgcggcgcgggcggcgaggttctaccttcgaggatttcttttccattgtgtcggtgtcttttttacatgccctggtccaccggaaggccggcgcctcctctgtcagtgccgtgtacgtgtttggtcaaacgttcctaatggtgcctgaacctacactga

SEQ ID NO: 52 - DNA, 138524 bp, Homo sapiens
ggccgcaggcgcaggcccgggcgacagccgagacgtggagcgcgccggctcgctgcagctccgggactcaacatgcgctgctcgccgggaggcgtctggctggcgctggccgcgtcgctcctgcacggtaaagccactgcctccccgccctccactcctccgtgggatcccgggcacatcccgggcgcctctgtgcgccccgcgcctgggccaggtttgggatctccccgccgccggggaggggcagcgggggcgctgcgggggctgcttgtctgggctgcaccgggtgggcggcgggggacgccggcaggagggagtcgggggtacccccgccggcctgccctgagccccctgcccgggtcttctctccttaagtgtccctgcaaggcgagttccagaggaagctttacaaggagctggtcaagaactacaatcccttggagaggcccgtggccaatgactcgcaaccactcaccgtctacttctccctgagcctcctgcagatcatggacgtggtgagtcccgcctggctacagggctgccctctccccttcctgggctccgaggggctttttagacagcgtcgggcggccaggcggtggagctcggctggggcactctagttggccccaagctaggcagggccatgctctgagtctgtccccagcctgccctctcctgagtgtctcatttctcggtttcccctccagccaaggagggacctggtaaagcttattccatcaccctggccacctgtgcatggttacttgggtcccacctttctctcaggttagaaactcaagcatcctgagctgggactcagtagcaagaacaggtgaagttcactttttaatctcccttatggtgtaagtgttgacttgcattccagcattgtcaatttagccacttctagacttttctgccgcctatggtatgtaacttctttggtgggggcctggccctgagctttgcagctggcgaatctatccaggcagagggcaagagggccagctgtgaactttcactgtgaccccatcttaggaatgggcatgctttgccttcctggtgaggacaggtactgggagtcctgctccgaggactcagggttccccgtcaggaatacatgtgtctgtccctccaggcagctgccatcagttccgtgggtctcttgccttgcagccttgctagtgcccacttcagttagccaatctgtgtaaacttgcctattgttcctctatgctgctttggatattcaatattcatggtatattctccatacaatacaaatacttcacacaagtgtttaattcattataagtgggtttggtgtcttgtctatacggagtatcggattctattgtggagcaccctggagtgtggcagggtggggcacagggataataatgttcattgggagggagagcatgatgggaaagaggtgagagaatagccacaattactggttaaaaaagaaatagtgctaagagctacctggcaaagtggaaaaaggtaagaggtgatatttcataatcctacaaataaacagttacccgcactatcatgttgatgaatggtatatcacttaacctagttaaaattgccatcatacattgcctcctttccaacgctacactcgcctcaaatgtgttcttcctcctacagacagaatcatgctttaaaatattgaatgtatatgtgatgatgtggaaaagttatcatgagaagagctgtaggggaaggcaggttcagtctcatgtgttgcagagcagcaaaagttgctgtttatggagcagttcctcagttgctttaaagagctcaggatttgtacttgggatcttcggtgggttctgtctgtgttggtttctggatggctgctgttaggtaagtttcttaagcatcttgagccttggctttccggctaataaaatgcacactgtcagtcattgtgatcaactaaagaatatggaaacaacttgaagagaccttaaagctagatatgtgattatggtcattttcatgcagaaaccacatgaaaaaggaccaggcagcagagctaacacaccccgcaagtggtgtgtgacagggtgagaaagggacagtagccccctcttcccccatttgtccagggtcaactccagccaggctgtcacactgtttgtgtctgctccacagctgtctctcttggagtgggtgaccctgtattgcctggatgggggtgatggtgtagtagcccctcagtagaggaacaggaggaagtcagtagaacaggctcctgaggttgcaaaggctgcggcagcaccttttggagaagagaccactcgcggagaagctgcaggctttcttctgggaacttcttctttaagagactcttaagaaaccaagttattatgaggagctctgagtcttaggagaagtttaggcataagttagtgttatactacatgaacatttaaaataacttttgtcatgttagaaaattacaaaaatagcacattggcactttgtgtcaatgacattccagtgtccttaggaaatgcatgtgaagaaggctgtcagcagccagaggtcatgggaagggggcgggagaaagtttatctctcaccttagccgtggtattggctgtgaacacattgaacttcccagccaggcaatgctatgttcatggagtggccttgaacaaactcacttacctttctaagctctgttttctcatgtgttaaatgagaataataatacctgcttcagagggttttgagaggattaaatgagagaaagtgcttgcccacactggtgattcactgaaggtctgctccatcttaattatgtaactactcaactcagaggtcaagaagtccatgcctagaagggtgtggtcacatgcccaaggtcactctgtgattagaggtagggctatgaggaaaaccaacatcggacaagtcctttgtctttcatctgctgcttcctttagacttggtaacttcggcagaacaaagtcatttaatttatttaaactgggtgaattgtaactaatttaatgtgactttcctgagatcctggatgaagccgaagtctctatcagacataacaaaatatgcaaacatttgtattccagccttacttggctctgcctggtttttgaagcagagccaggtctctccagctgaaatctcagcgctctggacagagacacaatggttctcataaaggcttcgtgtggcaaaatcttggctggtatagattctctttacacatttgttgcccattttaactggactgttctagagaccatagtagttggttttcctactcccaaatattgttattgattgcttttgtttgtcagcagagattcctgactggagtgataggaagacaccatatgatgttacatatttgatttttgtgaaagatcatttactctttaatcaatttattccacacatgctattgagctcctgttgtagactttgacaaattctgagaattaacagaaagatgagggattatttttcctttcagagatctcatgagctggctagggagattaaaaagtaaatccaaaattacatgtgatgaaatttaacataaatatctatacaaagtgctagaaaacattgtgttcaactagagcagctgagagtggcttcaaagagatggtggttagagttctaaagatgagaaggagtttgccactgaaagtaggaaatcttttccaggttgaggaaagactgaaagtgcagtggaggacagctcactttcaacaaggtgtgttttatgggacactggcaacctgttgatctttactacaggttttgctgcaagacttctcagaaaatttatgctatgttttttgagacattctaaaagaccaatatagtactgaccaaactactgatagttttatagacccttttgtaagaattatatgctctagaagcacaccttacaagggggaggctatgatttttctttggtaggaggtgctagatgagtgtggggacagtaaggttgcagtgtgtgaggcgtcctgagttcctctgcaagtttgcatttcacctggccctagtctaggcatctctgagggcatgaggaggcagtgtgccaggggttttgtgaagctgtaagaccagcctgccatagcatattttcctagaaaaggaaatagtccaaaccatgatatttgtattaaattcaagtataaattatagattggagtgaaaaaactttgcatacattttagaggtacaacatgagtcctcaaaggaattgcttgacctgctgttattcaacaggctccttcatgaagcactaggcagagggggaagatatggtgggtcgttaaacaggggagggaagtaaccgaatctctgcttaagcagaagatgctgagagcagtgagtgtgagacgggtcagagaggagagaaaggtaacggacaaggaggttgaaactaggatggccactgtgggaatgtggagaagggggcagatttaagagatgttttggatatattgtctatgatctataactgtgtgtataaacatcatgaatatacatcaataaatttgctaagtgaaagtgcctaaattattcttatatgcacacactgacttctggtgattattaatttacttcctgggcttgtaactgggctgggaatgagataatacataagaaatcattttgaagtgatgcatgtgtgaggttctaatctgccaagtttccataatgtttctttctcctttatttgtgctgtttagtcagtcacctgagcacatgcatctgaaggccattctaagtgatttgcataaaataaatatgcattggttatgaagcatgtccagaagtcaagtttgttaataatatgaaccaacatgtaattatatacaaatgtaaaacacataattatacaagattgactattttggtattttattgatttgaaatgcagactcagctttttggaagctttagtcacaagaccgtagaactaagtggtcatgcacttacgttttggcactgaagatggcaggcagggctgtggagcccagtatcctaagggcttatgtgttatctgaattcctttggggggccctctgtgtaggtttgcaatatgtatgattttacattcattagccactatttaaaatgctacaactccaacaaaatactgtcaaatattataaaacccacatacctagaatatattgtaaaaagaaatgctgaaggtataatcaggtattgatctttatcatttaaaaaaatctttacttttttgagcagttttagcttcacagcaaaatgaagaagaaggtacagagatttcccacagcttcctcaattatcaacattccccactagagtagtatatttgttacgactgatgaacttacattgacacatcatcatcaccccaaatgcatagtttataagaaggttccctcttggttttgtataatctatgggtttgggcaaatgtataatggcataatgtgtaataccctcattatggtatcatacagagtatttttactctcctgaaatttctttgtgctctccctgcttatcactaccttcaccacagctcttggcagccgctgaccttttgttgtctccatagttgaaccctttccacaatgtcgtatggttggaatcatacagtctgtagccttttcagatggacttatttcacttagtaatatgcatttatgctctctccatactctttcatggcttgatagctcactcctttttagcactgaataatatgccagtggtctggatgtagcacagttcatttatccattcacctccggaagaacatcttggttgcctccaagttttggcaattatgagtaaagctgctgtaagcatcttgtgcagatttttacgtgaacataaggtttcaatcacttgtgtaaataccaacgagggcacttgctggttcgtatgctaagagtatgtttaattttctaaggaaatcacagactatctcccaaagtggatgtaccattttacattctcaccagcaatgaatgagagcccctgttgccctttatccatgtcagcatttggtgttgtcagtgttctaagttttaagcattccaataggtgtgtagtggaatctcattgttttatatttgcatttccctgatgacatatgatgtggagcattttttcagaagcttattgccatctgtaggtcttctttggtaaggtgtctgttaaggtctttggccaagttttcagtgggtttttttttttttttcttatttctgaatttaagagtttttgtatatttttgatgacagtcctttatcaggtatgtcttttgcaaatatttttcccagtcagtaccttgttttctcattctctttacattgtatttcacagaacatacatttttaactttagtgaaacccatcttttcaattctttcttttatggattgtgcctctggtattgtatctaaaaagttactgcaatatccaaggtcatacaggttttcctctattatcttctaggagttttatagttttgcactttacatttaggtctgtggtccactttgagttaatttttatgaagggtgtaaggtccgtgtctacatttatctttttgcatgtgattgtccagttgttgtagcaccatttgttgaaaagatgatctttgctccattttattgcctttgcatctttgtcaaagatcagctgattatattcatgtgagtcttatttctgggttctctgttgtgttttgtcgatctctttgtctattctttcatcaataacacagtcttgattactatagctttatcctaagtcttgaagtttggtagtatcagtcctccaactttgtcgttcctcaacattgtgttggctattctgggtcttttgcgtctctctataaactttataattgctttatcgatacccacaaaataaccttctgggatttgattgaatctgtagatcaagttgggaagaactgacatattgacaatactgaatttttctattcatgaacatagaacagctctttagttagttcttcctttattttgtttgtaagaattttgtagttttactcatatagatcttgtaaatactttacttgatttttacctaagtgcttaatttttgaggggttaaatggtattatgatttcaatgtcaaattctacttgttaattgccgaaatataggaaagcgatttacttttacatgttaaccttgtcttctgcaaagttgctgtaattgtttattagctcctggagattttttttttggtcagttattttgggttttctacatgaacgatcatgtcatctgcgatcaaagacagctttatttcttttttcccagtctatatactttttatttcctttttcttgtccttttgtattagctagtacttccagtgtgctattgaaaggagtgggagaggggacaaccttgacttgttcctaatcttagtgggaaagcttcagttttcttatcattaggtatgatgttagctataggttttttggatatgtatatatatatatataaatatacatatgtacatacattttgtgtatatgtaaaatatgtgtacatgtttacatttatgtataaatatgtacatacattttgtatatttatttacatttatataaacatattttgtatatataatatacatattttatatatacatatgaaaaatatgtatatacacacatatacaaaaaacctacagctaacatcatacttaatgatatatatatttatcaagttgaggaagttctcccctattccgtttactgaaagtttttgtgatgaataggagttggattatgtcaaaattgttttcatctattgatataatcatatgatttttcttttgtagcctgttgatgtaatggattatattaattttttaatgttgagccagccttgaatatctggaatgaatctcacttgaccatggtgtataattctttttgtacattgttgagataaatttgctaatttttaaatttttggttgagacggggtttcactatgttgctcaggctggtcttggactcctgagctcagttgatctgcctgtctcagcctcctaaagtgctaggattggaggcgtgagccaccacaacgtgctaatattttgttgagcatttttgaatctgtgttcatcagtgatactggtttgtggttatcttttcttagaatgtctttatctgccatttgtattagggtaatgcaggcctcatagaatgttttaggaagtatttcctctgcttgtgtactctgaaagagactgtagataattggtataatttcttttttaaatttgtagacttcaccagtgagcccttctgggcctgttgctttctgttttggaaggttattattatttgattcaattgctctgatagatataggcccattcaaattgtttatttcttcttgtttgagttttgagaaattttgtctttcaaggagtagtccattttatctaggttataaaatttgtgagcatagaattgttcatagtatttatttgttatccttttaatgcccatgggctgtgtaatgatgtcttctacttctgatattagttatttttgtcctttctcatttttttcttatttagcctggctagatgcttattgattttattgatcatttttcaaaaaacagattttgtttttgttcatttcctctattgatttcctgtttacaattttgttgatttctactctaatttttagtatttctctgcttattttggacttaatttgctcttttttctagtttcctaaagtagaagcttagaatactgatttttagatctttcatttctgtacatttcaatactgtattcagggctatagattttcgcttaaggacttcttttgctgcatcccacaaattttgataagttgtgttttcattttcatttcagttaaaatatttcaatgtctcttgagaattcttctttgaggcatatattatttaaaggcatattgtctaatctccacgtatttttggatttttcagtaatctttctgttactgatttctagtataatttctttgtattctgatagcaggcaatgtgtaatttctattcttttaaatttgttaaggctctttctgtggcacaattatggggaatattccatgtgaacttgagaagaatgtgtattctgctgttgttggataaaatagtctatagatgttgcttatatccaattgatggacaatgttttgagttcaatcatgtttatactggttttctgcttgctggttcttcaaatttctggtagaggggtgttaaagtttccaactgtgaaaatggatttacctatttatccttgtaggtctaatagtttttgcctcattagtttgatgctgtgtttttgggcatatacacattaaggactgttatgtctttttgtagaactggtctttttatcattaagtaatatccttttttatccctggaaactttccttgctttgaagtacgctctatctgaaatttacatagctattcctgctttcttggattagtgttagcatggtatatttttctccatccataagacactgttaatttatatgtgtctttatatttagagtgggttttttgtaggcacatacagttgggtcttgttttttgttctactcttacagtctctttaaattgatgcatttagaccactcagagtgattgtcgatatagttggatcaataactatcatatttgttactgatttttttgttgtccttgttccttatttcagtttttgttttccactctgacttttatggtttagttggacattttatatggttatgttttccctcctttcttggtgtatcagttatagttctttttttacttttttagtggttgccctagagtttgcaatatacatttacaactaacccaagtcacctttcatgttacattataccacttcatgcataatgagagcactttataatgcaaaataacatgaatttcttcctcctgtcccttgtaccatttatttcttataaggtgcgtgtgtgtgtgtgtatatgtgtgtatgtgtgtgtgtgtatatgtattatatatgtatatattatatatacacaaagtataataaaatacatttttgctattgttactttgaacaaactgttatctgttagataaattaataagaaaaacaaaagtttttattttgccttcactttttccttcttcagtggttctttctttaatttagatatgactttcaacctgtatcgtttccctttttttaaagaacttcttttaacattttttcaaggcaggtctgcttgaaacaaatttcttcaatttttgcctgagaatgtattttttttccttatcttttgaaggatgatttcaataattctagatttgtgactttctctctcaacactaattattttactctactctttttgcttgcatgatttcatgtaagtcagatgtaattcttacctttttggtcctctaaagggaagggttttttgtctgcctttggcttccttcaggattttatctttatctttgtttatagtttgaaatgatatacttagatgttggattttttttcccccacatgtatcagcttgctgttttctgagattcctggatgtgtggtttggtgtttgacactaatttggggaaattctcaatcattgtttcaaatacttctgttcctttctctacttcaacagtccccaacctttttgacaccagggacctgttttgtggaagacaatttttccatagactgtcgggggccatggttttgggatgaaactgttccacctcagattgtcaggcattcattagattctcataaggagcgtgcaacctagatcccttgcatgtgaaattcacaatagggtttgtgttcctgtaagaatgtcacgctgccgctgatctgaccggaggcggagctcaggcagtaatgctccctgacctgcccctcacctcctggtgtgtggcccagttcctaacagtccaggtgacaggtactggcctgtggcctgggggttggggaaccctgctctacttcttctccttctcgcattcccatcacacatatgttacaccatttgtaattgtcccacaatccttggatattctattctgttgttttcagtctttgttctctttgcttttcagttttcaaaatttcgattgatattcctcatactagggattctttcctcagctgtatccaacctactagtaagcctatcaaatatattctttatttttgttacattatttttgattgctggaatttctttttggttatgtcttaggagttccatctctgtgcttacattgtttaactgttcttgcatgatgtctgctttttccattagagcctttagcttattaatcatagttgttgtaaattctgatctgataattccaatactgctgctatgtctggtactaatgcatgttctgtctcttcaaattgtgttttttgtttgttttttgccttttagtatgctttgtaattttttcttgattggtggctgtgatgtaccaggtaaaaggaactgctgtaaattaataagttactaatgtagtgttaaggtgtggagggaggggaagcattctatactcctatgattaggtctcagttttttagtgagcctttccctctggacacgaacttcataggtgtttctcagtttgtttctccccacttgagtgcgataggatggctagagtgggtggagttcagtatttcccttcccttgtgtcaggtaagctctcataataccccggagggttagactctggttaattcatttctcctgatggcaggccttattaaaaacaacagaaaattctggcacatttccaagtggtttctttcacttccctctggtggaaggatgagggaacatttcttcagtatttcctgtgggaacctggtagagcttctggaggtaaatctcatgatatttgggaaccccctatgattgaatccttttggaatttttaactttcaaagttgtacacactgagcctccaggaatttgccaattccagtttcaggttttcttactctgctgctggttcctgtggtggttttgctgattagtctctgctctggaaagtcctggctctctgtatgtccctgtttgtccccctaatcttgagagcagaagttcatcctgtgtgttcccctcttagttgggctccaagaagagctgttgtttttctagtgtgttcacctttttacttgttaggacaaagttcattctgagcttcttgcatcaggaaccaggaactggatctaataatgtttttataagatacatttcttaaaatgacaaaagtaatatgtgtttgtacaggagctaaattaaacaaaccaaaaaaagaatcaagaagttgaaaatcaagggggtaaaaatcagcacacacaaggcattctggcagagttcatgctatcttttctttatgtttatagatgtgtagagaaatatttaaatatttaaaagttaaaaggtataaacatgatgtatggtgccttaagcagtattaacaggcattgattttaaagtggtacacttaggcccattagtaaacaaatacagattttaaaatacatttatatgttttcttcattaactcttaccatcactgcatattcaatctatattccttttgtaatttaaaaaccattttaaaaatgtgtttaaatgatttatgatgatacttataagtaacacatagttgggtttttaaaaaaattgaatttgataatctttgtattttagttatccttcatgtggttactgatctatttggttttaaatctatccttcactgtttacttccacttacccttgtctcttctatgttctttttttcctcttttttcttacacttttctggattaattgctcattttatattattctaattttctcttctattagtttgttagtcatatttctttctttttgtcttacagtggttgatctggagattacaataggaatccatgactaagtaaagtctagtgaaagtcgtcaacctttctgtacaatgtgaggactttacaacactttaattccataattccaatttatctactgttattgtcatatattttatttctataaatatatttaaaccttataagattataattgtcttttacagtcagtattcttttagatttactcgtatatttaccttttttgttactttaattcctccctgtatcttctaactttcatctgagataattttccttctgccctttagacttctctttcttgagagtctggaagtagcacaatttctccatgtttgtttcaaaacttatttatattgcctaatttttgtgtgataattcagaaatacagactttgtgttgccggttagttacagcacttttatatacagcatagtgtctatagtcgattaccctagtgttttctgacttcagtacttctcttaagaggtcagctgtatgccttactgttgcttctctgttcttgttttctttggtcacttttaaattttattctttgtctttgatttttaacagttttgctatgataagaatatgtttctgctcttttgttttacctgcttgggattcagaatgacttattgaatctgttccttggtttcattcacaagttttggacaattgttgccagatcgatcgatcttttcctccttccttccttccttccttccttccttccttctttttttggggatggagtctcgctgtgttgcccaggttggagtgcaatggcacgatcttggctcactacaacctctgccacctggattcaagcaattcttctgcctcagcctcccgagtagctggaactacaggtgtgcaccaccacgcctggctaatttttgtatttttagtagagacaggttttcaccatattggccaggctggtctccaactcctgacctcatgatccgcctgcctcagcctcccaaagtgctgggattacaggcgtgagccactgtgcccggcctagatatttctttagatatggcttctgctctattttttctgccttccctttttgggacaatgattacatgttcaccacagctttcactttatctcagtgattctcaaccaggggcagtgtctctccccagggaatatttggcattatcttgaaaaaatttcagttgccccaactggggagaaagatgctactgacacttacagggaagaggctagggatgctactaaatgacctatagtgcatagggtgactcctcaagaaaaagaattatctggcccccaatttcaacagtgctgagatggagaagactaatttattccatatgcctcctattctttgcggcaattcccattactttgtctctccatgcttcatccggtccgttttctgttgacatatattcaatattcagtccttgaattctctcattgtgtctatctgttgttagtcccatttattgactcctttttaaagtttcagatattgcatgctttagtgttaagagtttccttttggttcttacgatgttttctagctctcaagcttgttctgattttcttcaaatatattaataagacttttttttatagtccctgtctgataattccattcttaagacactttgtgcctctgtttttattagtgatggctctttttgcttttctgttacatggtctgtgctccttctgagcctggttgtgtttgtagtttgtcccagacaatgtatgggaaaaatggtagagatgagagaacggagaacacttttactcctgttaatatttgcttctgacaacagccaccccatgggtaccagcaaccacacataaccttaattagattagggattgagaagatacgaagatgggcttcagtccctttaagcgctggtttgtttctggttcttgcatatacattctagggcataaatacagagaatttactagagtcttctctctcttcaataagtttttttttttttgagacagagtctcactttgtcacccaggctggcatatggtggcacagtctcggctcactgcaacctctctctcccgggttccagtgattctcctgcttcagccttccaagtagctggtatttttttttaatattttaagttttagggtacatgtgcacaacgtgcaggtttgttacatatgtatacatgtgccatgctggtgtgctgcacccattaactcgtcatttagcattaggtatatctcctaatgctatccctcccccctccccccaccccacaacagtccccagagtgtgatgttccccttcctgtgaccatgtgttctcattgttcaattcccatctatgagtgagaacatgtggtgtttggttttttgtccttgggatagtttactgagaatgatgatttccaatttcatccatgtccctacaaaggacatgaactcatcattttttatggctgcatagtattccatggtgtatatgtgccacattttcttaatccagtctatcattgttggacatttggcttggttccaagtctttgctattgtgaatagggccacaataaacatacgtgtgtgtgtgtctttatagcagcatgatttatagtcctttgggtatatacccagtaatgggatggctgggtcaaatggtatttctagttctagatccctgaggaatcgccacactgacttccacaatggttgaactagtttacagtcccaccagcagtgtaaaagtgttcctatttctccacatgctctccagcacctgttgtttcctgactttttaatgattggcattctaactggtgtgagatggtatctcactgtggttttgatttgcatttctctgatggccagtgatgatgagccttttttcatgtgtcttttggctgcataaatgtcttcttttgagaagtttctgttcatatcctttgcccactttttgatggggttgtttgtttttttcttgtaaatttgtttgagttcattgtagattctggatattagccctttgtcagatgagtaggtcgcgaaaagtttctcccattttgtgggttgcctgttcactctgatggtagtttcttttgctgtgcagaagctctttagtttaattagattccatttgtcaattttggcttttgttgccattgcttttggtgttttagacatgaagtccttgcccatgcctatgtcctaaatggtaatgcctaggttttcttctagggtttttatggttttaggtctaacgtttaagtctttaatccatcttgaattaatttttgtataaggtgtaaggaagggatccagtttcagctttctacacatggctagccagttttcccagcaccatttattaaatagggaatcctttccccattgcttgtttttgtcaggtttgtcaaagatcagatagttgtagatatgcggcgttatttctgagggctctgttctgttccattggtctatatctctgttttggtaccagtaccatgctgtttggttactgtagccttgtagtatatagtttgaagtcaggtagcgtgatgcctccagctttgttcttttggcttaggattgacttggtgatgcgggctcttttttggttccatatgaactttaaagtagttttttccaattctgtgaagaaagtcattggtagcttgatggggatggcattgaatctataaattaccttgggcagtatggccattttcacgatattgattcctcctacccatgagcatagaatgttcttccatttgtttgtatcctcttttatttcattgagcagtggtttgtagttctccttgaagaggtccttcacatcccttgtaaggtggattcctaagtattttattctctttgaagcaattgcgaatgggagttcactcatgatttggctctctgtttgtctgttattggtgtataagaatgcttgtgatttttgtacattgattttgtatcttgagactttgctgaagttgcttatcagcttcaggagattttgggctgagacaatggggttttctagatatacaatcatgtcatctgcaaacagggacaatttgacttcctcttttcctaattgaataccctttatttccttctcctgcctgattgctccggccagaacttccaacactatgttgaataggagtggtgagagagggcatccctgtctgtgccagttttcaaagggaatgcttccagtttttgcccattcagcatgatattgactgtgggtttgtcatagatagctcttattattttgagatacatcccatcaatacctaatttattgagagtttttagcatgaagggttgttgaattttgtcaaaggccttttctgcatctattgagataatcatgtggtttttgtctttggttctgtttatatgctggattacatttattgatttgcgtatattgaaccagtcttgcatcccagggatgaagcccacttgatcatggtggataagctttttgatgtgctgctggattccgtttgccagtattttattgaggatttttgcatcaatgttcatcagggatattggtctaaaattctcttttttggttgtgtctctgctcagctttggtatcagaatgatgctggcctcatgaaatgagttagggagattccctctttttctgttgattggaatagtttcagaaggaacggtaccagttcctccttgtacctctggtagaattcggctgtgaatccatctggtcctggactctttctggttggtaagctattgattattgccacaatttcagctcctgttactggtctattcagagattcaacttcttcctggtttagttttgggagagtgtatgtgtcgaggaatttaccatttcttctagattttctagtttatttgcgtggagatgtttgtagtattctctgatgatagtttgtatttctgtgggattggtggtcatatcccctttatcattttttattgcgtctatttgattcttctctctttttttctttattagtcttgctagcggtctatcaattttgttgatcctttcaaaaaaccagctcctggattcattaattttttgaagggttttttgtgtctctatttccttcagttctgctctgattttagttatttcttgccttctgctagcttttgaatgtgtttgctcttgcttttctagttcttttaattgtgctgttagggtgtcaattttggagctttcctgctttctcttgtgggcatttagtgctataaatttccctgtagacactgctttgaatgcatcccagagattctggtatgttgtgtctttgttctcgttggtttcaaagaacatctttatttctgccttcatttcgttatgtacccagtagtcattcaggagcaggttgttcagtttccacgtagttgagcggttttgagtgagtttcttaatcctgagttctagtttgattgcactgtggtctgttcttttacatttgctgaggagagctttacttccaggtatgtggtcaattttgggataggtgtggtgtggtgctgaaaaaaatgtatattctgttgatttggggtggagagttctgtagatgtctattaggtctgcttggtgcagagctgagttcagttcctgggtatccttgttaactttctgtctcgttgatctgtctaatgttgacagtggggtgttaaagtctcccattattattgtgtggcagtctaagtctctttgtaggtcactcaggacttgctttatgaatctgggtgctcctgtattgggtgcatatatatttaggaaagttagctcttcttgttgaattgatccctttaccattatgtaatggccttctttgtctcttttgatctttgttggtttaaagtctgttttatcagagactaggattgcaacccctgcccttttttgttttccatttgcttggtagatcttcctccatcctttaattttgaggctatgtgtgtctctgcacgtgagatgggtttcctgaatacagcacactgatgggtcttgactctttatccaatttgccagtctgtgtcttttaattggagcatttagtccatttacatttgaagttaatattgttatgtgtgaatttgatcctgtcattatgatgttagctggttattttgcttgttagttgatgcagtttcttcctagtctccatggtctttacattttggcatgattttgcagcagctagtaccggttgtgcctttccatgtttagtgcttccttcaggagctcttttagggcaggcctggtggtgacaaaatctctcagcatttgcttgtctgtaaagtattttatttctccttcacttatgaagcttagtttggctggatatgaaattctaggtgaaaattcttttctttgagaatgttgaatattggcccccactctcttctggcttgtagagtttctgccgagagatccgctgttagtctgatgggtttccctttgtgggtaacccgacctttctctctggctgcccttaacgttttttctttcatttccactttggtgaatctgacaattatgtgtcttggagttgctcttctcgatgagtatctttgtggtgttctctgtatttcctgaatgtgaatgttggcctgccttgctagattggggaagttctcatggatgatatcctgcagagtgttttccaacttggttccattctccccgtcattttcaggtacaccaatcagatgcagatttggtcttttcacatagtcccatatttcttggaggctttgttcgtttctttttattcttttttctctaaacttcccttctcacttcatttcattcatttcatcttccatcgctgatacccattcttccagttgatcgcatcggctcctgaggcttctgcattcttcatgtagttctcgagccttggctttcagctccatcagctcctttaagaacttctctgtattggttattctagttatacattcgtctaaatttttttcaaagttttcaacttctttgcctttggtttgaatttcctcctgtagctcggagtagtttggtcgtctgaagccttcttctctcaactcgtcaaagtcattctccatccagctttgttccgttgttggtgaggaactgccttcctttgtaggaggagagtcactctgctttttagagtttccagtttttctgttctgttttttccccatctttgtggttttatttacttttggtctttgatgatggtgatgcacagatgggtttttggtgtggatgtcctgtctgtttgttagttttccttctaacagacaggaccctcagctgcaggtctgttggagtttgctagaggtccactccagaccctgtttgcctgggtatcagcagcggtgtctgcagaaccgcggattttcatgatccgcgaatgctgctgtctgatcgttcctctggaagttttgtctcagaggagtacccggccgtgtgaggtgtcagtctgcccctacttgggggtgcctcccagttaggctgctcgggggtcaggggtcagggacccacttgaggaggcagtctgcccgttctcagatctccagctgcgtgctgggagaaccactgctctccttaaagctgtcagacagggacatttaagtctgcagaggttactgctctctttttgtttgtctgtgccctgcccccagaggtggagcctacggaggcaggcaggcctccttgagctgtggtgggctccacccagttggagcttcctggctgctttgtttacctaagcgagcctaggcaatggcgggcgcccctcccccagccttgctgaagccttgcagtttgatctcagactgctgtgctagcaatcagtgagactccatgggcgtaggaccctccgagccatgtgcgggatataatctcctggtgtgccgtttccgaagcccgtcagaaaagcgcagtattggggtgggagtggcccgattttccaggtgccgtctgtcacccctttccttgaccaggaaagggaactccctgaccccttgcacttcccgagtgaggcaatgcctcgccctgcttcggctggtgcatggtgcgctgcaccgactgtgctgcgcccactgtctggcactccctagtgagatgaacctggtagctcagatagaaatgcaggaatcacccgtcttctgcattgctcaggctgggagctgtagaccggagctgttcctatttggccatcttggctcctccccaagtagctggtattacaggcatgcaccaccatgcctggctgatttttgtatttttagtagagacggggtttcaagacgttccccaggctggtcttgaactcctgacctgaagtgatctgcccgccttggcctcccaaagtgctgggattgcaggcatgagccactgcacctggccctctcttcagtaagtcttgagctcaaaattttccacttttctcttaagtttgtcaaggtttgcttaaaattttagcctcttaagcattattaaataatcaccacaggctctggaaaggtggcctcaaatcttggtattctctcagggctcccctctcttcctggatcttgtccctgcaattcctcactgctctattagtattctggtgcccttaagcatgatttttttttttttttttccccaagctcttctaattgttctcactggagagttgatgagaaccacctagttgatcatcactgatagcagaacagaaattctaagtggaaataaatatcatatgtgctctctaatttgtggaagctaagaaagtggatctcacggaagtagggagtgtagtggtggttaccagtgactgggaagacagtggggagaggagaagttggttaaagggagtaagttagatggaagaggccaggtgcgttggctcacacttgtaatcccagcagtttgggaggccaaagagggtagatcacaaggtcaagagattgagaccatcttggccaacatggtgaaaccccatttctactaaaaatacaaaaattagctgggggtgatggcgcatgcctgtagtcccagctactcgggaggctgaggcaggagaatcgcttgaacccgggaggcagaggttgcagtgagccgagatcgcgccactgcactccagcctggtgacagagcgagactccatctcaaaataaataaataaatacaattaaataaaaaagttagatgaaagatatagttagatagaaggaataagttctagtatttaatagtatagtagagaaattatagttaacaataatttattgtacatttcaaaataactagaagagcagacttgtaattttcccaacataaaagataaatgtttgaggtggtagataccccgatgatactgatttcatcattacacattgtctgtgggtatcaaaatatcacatgtacctccaaaatatgtacagctattagatataaataaaaaaatctgtaatgcacctttataattgataccaatttattatggttgaaattttgtctcctaaaacctgaagaggtttaggagacagagccctgaagagggctgtgggagataaacccacaaaattcttttaatctgtatagactgagaattgtaagcacttttactaaaggaatctttcttgtaaatgttgcctttcaaggctaccactgaagatattccctgaagggttcagctctctcagagcttctcgtttcatctttgacatgctgttaaaggaagagaaatagtcttgtcatggaggaaggccaacgaaaatctctgctgccttattgatttatttttaaaatcaggattaggtagtgttttactcctcctcaaagaagagggaagtcatttggcatcttctacttgcagttcccatgctcttaatttcagtgatttccttattcagttaacatcagttataaaccattatagccaaagaaattcaaaaagtattgtaaaatagtatgtacttgggcatatttatgtgtgtgtaaatgcacactcagtcacacacacccctgttatccttagctctccttgttgattttatttttgatatctcaagacaaggtatcatgtactatgctaattaagtttccaagatctaaagcttgaagataccgcagaggccttggagtcacagctcccaggtagccaaaacaatggactgaaactaataagaaattaagcaatgaattatacaaaatcttgtattacgggttaaaaattagtgcagaagaatgggctgtgggaaaggcctggatgtgtggctgactactggctctgcgtcagctcgtaggtgtaggagctgacctgtctaagctgtaggtggcagtggacgaggagtaggaaattgcagttgtcatggttaatgaatgccacctgtgagagattctcagcatgggaaatttactcttgcatcattggaagtgaattgtctgtaaatattcctgtcttggataaaagagccatggtgtctatactctggggagaggacttagagagggaggagaacttatttactttattttgtggagagaaggcacgtgttaggctaactctttagttggtttcaaatttcaggattgttaaatgagtttataatctaaagtatctattttaagaagtccacacagagaagatattatgatcagagatttagattaagcaaattagggtaaggctgctcactgattgccaaagtatatttcattaagtgcaaatggatgaaatttacaattgaaatcactagtcaggaaacagtttgtttaagttctccattaagaagttttattgtcatttgaagtaacctttaacacactgtgttaaaggtctctcgtagagagacacacatcttattttggaagttattctttaaccctattctaaaactttaaattgtagtagagtagatatacactaatgtggcacgatatcaaaaccaattcagtgggttaccacaaagtgaaccccgttaagctgtcaccacccaatacagaccttcgctcctccagagctaaactgtttgccttacttcaaacaccaaagtctagttttgcccttctctggaactctgtataagaggaatcacccaagcacacagcatgcgttctttgggatctggcttttttggttcatttttatttttgtgagccacccaagttgttgtctgtagctcttctttcttcatttctattgtatgaatataacaacatgtattattatattgatggctatttagatttcttctagattttgtctgctttcaagaacacttcaaggaatgtgttacatgtcttctgacggacaggagtatgcatttctctctgatacagacgtaaaagtagattggcggggccatagggcagcgtgtttttaacttttctggatgatgctaaacaattttcaaaatggttataccaattagcattcccaccagcagtgtatgaaaattcttgttgctctacatactcaccaacgcttggcatttttagtctattaaatttaccattctagtgggtgtggagtgacattttcttgtgattttaattagcatttccctgattacagctaaggttgaggagattttcatttttttattttccattttgatatattattttgagaagtgtctaatcgtgtctctttactatttctctctctcttttttttttgttttgtgttggtttgtttttttctttattgatttgtatgagtttttctgtattacagatataaacccgtagtcattgtctttgttttgtgctgttataacagactggagactgggtaatttattaaaaatagaaatttatttctcatagttctggggatggtaaagtctgatatcaaggtgccagtatctggcatatcttgctgcttcacaacgtggtggaaggcatcacatggcagaagggcaaagagtgggtgtgagagagagagagcaagagggctaaacctgctcccttcataatgaacccactcccaaggtaactgcattagtccattcaggagggtggggccttcatgacctaagcatctcttataggttctgtctcccaataccatcctagtggaaattaaatttcagcatgagttttggaggggtcaaacattcaaaccattgcagttggccaggcgtggtggctcatgcctgtaatcccagcactttgggaggccgaggcgggcggatcacgaggtcaggagatcgagaccatcctggctaacacagtgaaaccctgtctctactaaaaatacaaaaaattagccgggcgtggtagcaggcgcctgtagtcccagctgctcaggaggctgaggcaggagaatggcgtgaacccgggaggcggagcttgcagtgagctgagatcatgccgctgcactccagcctgggtgacagagcgagactctgtatcaaaaaaaaaaaccaaaaaacaaaaccattgcagttatatgttttgcaggtatcttagactctttggcttattgttttactttttgacattctttcttttctccttttgtaaactttcaattgaagtatgacatgcttacagattaatggtgtcttttggtgaacagaaattcttaattttagtgtggcctagtttagaaatcctttcttctacatttagtgcttacagtgtcatattttaaaagtctttcccttccccaagttcatgaagatatttttctgtattttttagaagctttccattgttgttttagtgaatttttgttactgttttacctctcatgtttgtttataacccacctagaattgatttttgtgtataaagtgtatcacttttaagcagttttatggaaattggactggtgactaatttattttgtttttcaagagttgtgaaagggttgttagtggaattaatgcatgattgtttaactgtatcacatttggacattgtattgtccactatgcctgtgccctaatggacattttaattatttaatgtgtgtatgatatgaaaataatgtatgggtaatggaaatttttaatatttaaaaatgttgacatcacacacattatttacaaagtcagtagtaaagaagggcttatgagaagccctagcccctggccccaggtttcccatcaccatcctaagacaggtacttttaacaggctctgtttcaggtcatcactaatattttaacattctgcttatgtttctatttcttgattgattaaaatatcaaattctctggacctttactgaaattaaaatgcctttaattaaatatcttcagtatggatgttcttatttttaggagggattttgttaacaaagaaaacattaggcaaattcaatttagcagacgttatatgagcaaagaacaattcatgaatcaagcagcactcaggaccagaagaggttcagagagcttgactcagtagtgtgagcaaccagcttttataggctgaacacagaagcaaattagataatctgattggctaccactaggcacttgtcttacttggcatggggtgatgaattggctgcctgtgattggctgaaatctagctgttcatggttagctgaaactctgctgttatagtcctaagttaggttttggtttgtttgcttaataaattaggttgcctttgttaagtaggaactcaaagatgggagatagtctccagccagtggccttctgcttatttcatttagcagtttgtttattaggaatggcagtgtgtccctcaaatcaggatctgatgatgaaggttgttggctaatgattgagatagagatgggtttttttgtttgtttttgtttggatgcctatctgactctgaaggaaaagaaaaaaatttccctaagtttcttagcaaatcaaaagccttctacactgactgattttaaggataggctgtaattaggtaatgaacattttggtgtgttaacttggaaaaccccaactttatagccatagctaatatattcactgaaatatatttcgggttttgaaaatcaattggccaaaagctttaaaaacattctttttaaaaacaacatttaaaaactttcttgcagagttttcctttaaaaataaaaagtgctactttttaagcctttgatcaaatgttgacactcctcaactttgtgactgaatcatttaggacaatattttaaatttgcctaaaatatctgtaggttaaagatcaagaaaatttcttgattaaaagtgaaaggataacagatatgttgataaaaatggacaacgtccatagaatcctgatacttgcagacattcaggtgtttgtagttactcttcagggccacatcctataaacaactagaaatcaggatatacatgtaagtcaggtaaatttcagacagcctgtaatgtttcaagcaggaagatgtctccagatctgtcctggaggcttccctgttctttatattaccggtcttgcattttacaacttcagactaaacagaaactgtatcagaggcctttgtcttagtgatttaggccagggagtgatttacactgactagtggtcctaggagcagtaggcttttaattctgcttcctgcactctaggattgactatcatgctgttgaagatgatgtgtggctgcagggtgcacctccttgcctcctttccctctgaaacatgcagggttgttcggaccctccatcctcttccatgcacaaagcagttaatgcaaattccgtggtccaagacaatcctttgacagtaaccatcagtcatgcattaaaacagcagtgtacagatggtaccttcattgtttctgacagggacagttatgggcattggattaaagtaaaaactgaaaaggaatattcatgacaggaaattttccctttccgggggtgttttgcaacagcgggaagcagctggtcattgatgtgtcggcacaaggcagcttcctggatttccactggcttcctggatttttccaggtgtcacttggaaagtgtactgaattagtgcttgaaacttagtgttagagtgctcgaaacttagtctcaaatagaggaaatgaacacagagtaggatacataatgtggcattgtttggattgggaatgctgtacttatttcagaaatgccactcttttggaggaaaattagtttcctccttactttattgttaaatctgggaaatctggaaagggctgtgggggcagaactagagtgggctggtattcagggcctcctaataggtggctttggttgtgtgactttggatgcatatatcactgtgtatatttgaaaaaagccctaaagtaacatcatctatatgtatataactttaaagaactttaacatttttaaagcactttcactgatgtttgtctctttgatgatcatgtgaaatggtgttcttaatgactgtacctgtctaggcagagaacattttgggacctgaacccaggtcttctttgtatttttttttttctttttgggacagagtcttactctgttgcccaggctggagtgcagtggcataatcttggctcactgcaacctccgcctcctgggttcaagcaattctcatgcctcagtctcccgagtggctgagactacaggtgcacaccaccatgcccagcacatttttgtattattagtagagatagggttttaccgtgttggccaggctggtctcgaactcctgacgtcaggtgatgtgcccgccttggccttctgaagtgctgtatttttttgttttcaggatatttctgtttatttgctcattaaatgaatggattatgcagtagccaagataattgaaataggtgaccagtgagattttattttcagtttgaactattgatttttttggcatttgatatgttttactccattgcagttattctttctgatgcttgaactgtcagattggctcctgcattgttttgctttggtcactgtgatccttaatcatttcttctatttcctggcagaaaataaaataaggtgtcctgggctcactgtgtgtacctcccaccacagactggaatctgcctttgctaaggagcattacagtgggaaattaaatttagaagccacagactgacaggaggtattggaagaaattccaacttgagtctaacagatatctcagaaagagacaactgagcgaatgggaagtacagatatagagaaatgatttttttttgttttgtttgttttctaaaagcttctagatttgagggaaaacacaaacacatacttagaagcagcagacccacttcatccttcaattccagtacatcaggtgtaaggaaaaaaaggctatttaggacattacagagggctataacgcccaagctccgatgagaaactgattagtatcctaagatctctgaaacgccaagtagaaaagcaaaaaaaaaaaaaaaaaaaaaaaaaaaaaagtgttttcatgtatgcaaggattcaaagtttaccacccacaaattatctgaaagaattgctggaataatgtaatccagttatgcaaaaccaaaatcaaactctaagcagaataagtgagatataataaatccaagcagttagagtccagaaaatttggcattaagcctaattgtcagttgtcaaacatcccatgaaacatcaacagcaatctataactgaaacttcagaattcactctacaaacggtcctggaggagtgagggtagtgtatttcagaggtagaaaaagcagagaagaaatgcattctaagatacttttctatatctatatcatctatttatatgtatacctgtatatacatacctgtgtgtgtgtgtgcacgcgcacacacgcacgcatatggactgatttatgaaggcatatatagaaaaaataaattatgcattttcacataactttcacataaacttgtaaataaccactgtaagaatagaaataggatataaagttttcaaaccttgaagggcaataatggaacaaagaaaactgaacaatccaataaaactaagaaatgctttaagaaaacacaagaaaagtctggtaaacaggcaacatattatgacaacagaaacccaatcttatccgtaatcaccatgttgtgaattggacattttcagttgaaaatgttccagctatggccactttcaagagatagacttaaatcacaaattctcagacaaaaataagtaaataggcagataggcaaatggagatggggaaaagctgcagcaagcagatattaacagtggttacagaactgtatcttgctgtaatgggggctaattgaggaaaaccatctgcggcgggagggcgtgtcttcactgaggtgcgatggcattgttggctgctgaagcaggcatcagagtccgagaggaggacagagcacgtagccacaggatgagcacacccaccaagggctgatatgcagagctgcctacccgaggagcattgtgggccaggagagctttggattcatcacaagagcaagagatgcatggcagccctgtttcacaataagcatgttatctcactcagtccttgtggcaagcccattggatgtactgtcattctcccgatgttgttgattggataccaatgctggccagattcatggtgcttgtaggagtggaaccaccatgctcagcgggactagacagctgccaaacagtggaggctcaggaaaccccttcacttaagtgccagcctcacccagcccggacctgggaggaagccaggtagtggcaacagaagaggaggaaggaaagtcatccaggcacgtttcctgcgtggaaagaacagcctaagattgctcaaggtctggttcaaatggaggtgtccataaagagacttccagatcccttcccatcagaattaaccttttgcactcccacaataccgaaatactttacttatttatatgtggctattaggacaattcagagagagacaaaatgtttgaattcacaagaacaacatttaaaaatgagataaggccaggtacggtggctcacgtctgcaattccagccctttgggaggccgaggggggtgaatcacttgaggtaaggaatttgagaccagcctggccaacatgatgaaaccccatctctactaaaaatatagagattagccgggcgtggtggcaggtgcctgtagtcccagctactggggatgctgaggcaggagaattgcttgaacccgggaggcggaggttgcagtgagctgagattgcatcactgcccttcagcctgggtgacagagtgagacttcatctaaaaaacaacagcaacaacaaaaaacaccaaaaaaacaacaaaacaaaacaaataagatgagaccctcagtaattatgtgagcttgggaaagctaccacacctcttacattctgttctttaaagtaataataattcctgtgatattgtcacaatactcatgattggtgatactttttaaaattaacattttggtaatataactcttgcccatagtttaaaagctgagataattctgtgaggattattgttctctgcttccatttacatttctcatagacaaccaattctaactcttttagctgtttctttgagatttacgtgcatatcttgaaataaaatgcttatattaccactttttgctttagttctgttgaacaatggagaacctcacaatactgaaggtgaggacttagttctctgttcactctctacctccactaccacgcataattaacacacttcccttcatttatcacatttacctaatgaaattacataatcatttttgtttaaattaatatataatgtttatattaaaatctgtaaactcatgattcacagctgagagccatgcaataggctatattccttttccttagagttaatactattatctttggccggttgttgaatttttcatgtaatgatcactattctatccccaaactctccagtagacctgtaattttctctccccatgttcagacacgtggatctgtgtcttccatgttgttagagacatcttttgaagcattttatcctcctgcttgaatgtaaattgattgtttcctagctctgttctgcagctgtcagactgatattttcttttatgattgccttttgtcaacagctttctgacatcaactgagtattctatgacccagttcgattcagacactaccttgcacttctgcctggccatctacacatttggggcttcctacaacttcctcacatttgttaatttgctataacaactcccagaacttggtgctaaatagtcatttgatgatgaggatgcgttctgagaaatgcattattaggcgatttcgttcttgtacaaacatcagagtctacttacacagacctaggtgttatagcatactacacacttaggctatatggtagagcctattgttcctaggctataaacctgtacagcatggtgctttactgaatagtgtaggcaattgtaatgcaattgtaagtatttgtgtatctaaacatagaaaaggtgtagtaaaaatacagaataaaagataaaagaatgatatacatatacagggtagttaccgtgagtgcagcttgcaggactggaagttgctctggtgagtcagtgagtgagtagtgagtaaatgtgacggcctgggacattactgtgtgctactgtagacttcgtaaacactgtacacttagactacactaaattaaaaaaaaaaagtaattgcactgtgatgttatgacagctatgacatcactaggcaataggaattttttagccattataatcctatgggaccactttcagatacgctgtccatagttccctgaaatgtcattatgtgacacataattgtccttgtgattattgttttattataaaaatgcaaatgagcttccaggtgaaaagttacataggacaaagtctaggaagtcctaagcacagggtcttctgtctctgtggagaccagcagtgccatcctcttcatacattgatgtgttcaccaaccaggtagtttccccaagccttgccgtctggagttattgatggagtttcattttgtatgcatgattgattaaacttttgaccacatgattgagctaaattttcagcatccctccccttcttggaggttaagcctcaagttccagttctccaatcacttggttggtttctctggcaaccagcctccatcctgaaaccacttgagggaccccttccatgagccacttcattagcataacaaggaatttctgatttctgtcactaagagtttttgaagctctatgtcaggaaccatggacaaagaccaaatagctactttgtattatttcaatagctatcaactagagaatttcccttgccattctccatttgtggatccagatcctctttcctggtttatcttctcagttgatggatggtgtcctttattacagtttgggaaagggagcatagcaggattttgaagaccttatttttacccttacacttgatgaatagtgtggctaggaataagttgaatactttttcttagaattttgttgtttcttttcttattccaatgttccagttcccaatagctttgttttgctctctgaatgtttcttgttggaagtatctgatttttgttagtatttttaaagcaatgccgttgctctgttatagtactgaagttgtcctcgtcttcctccttcttcttctttcttcctccccgtgcccctttcccttccccttcttctttctttcttctgcttctgctgctgcttcattttcttcctgctccttgatccttctacttcttgcttttgctttttatggaatttttcttctacttcctgtattgtctgcatcctcaaagtcccttatctgttgtttattttggtctctatttgtcatattagagcctttctcatgatgataggtgatctttggtagaagctgtgtgtgtgtagtgtgtgtgtatgtgtgtgtatgtgtgtgtgtggtgtgtgcaggcagggggttcccatatgtctgtatggtagtggtggtgatgttggagaagtgggcttcatcatagcatgatttggatgggaacgtattttggggaccttaatatgattaggtcttttctcttcattggatcacatttcccagagaaaatttttctagtatgctacctgggcagtatgtgcctggcagtcagagctctggaaaccaaaacaagggaggggctgggggtcatgcattcttaacccacctctgttgtcagtatgcatctgtgctcttgctttacctatgctcatcatacagagtcctcctcatatttcctcttctgagaataaaatgctaatattatgccatggccaagagaggcagttgccacttgtgcattgtggttcttaaaatgaatatgcaacagagcctatgaagaacttttaaaatatgagtgttgaggtatgtatgtgaaaatagcagaataatggcctcaaaaattatttcctccataaaatcagaaagaagaaggaaactgccaacatttgccaaaagtaagtttttcaaaactttagaaataaactaagaggagaccaaaagctagcagcaatctggggagcatttattttttataaaaataggccgaatcttggtaagaacagtgacttttgtgacattttaacctgccctatttccttctcccatctccagctccctggtagccttgaatctgcaattcaggctgcaatcatgatgaaaccatcagcctttctgtcaccaaagtggagagaacagagttaaagctcctcagagtctcactgttggagaattgtcagtatttggtctgtctggtggttcagtagaagaccccacttgcaagactatttttacttgaccaaatgcagagctttcccagtctagaaagccttttccctgggttgttgggttgaaaatttagaagtaattgcttaaccttggggctgcctgaggcagtggatatcaactgaggaagataataagctataaaaagatgaaaaggaaaggctggggaattcgatgtccacaagttctttgaaaagctccaaaaaacacatgtaaggctgtgcacatgctcaggaaaaatctgagaaggccttagactctcacctctgactgaccttgagactgtgcacaggcaggaagtgaaggctaaagcagggctgtcagctgcctggctgtgtgcggaaggtgtgccccagcacacaacacagcccactgcaaacactgggggcagagctgtcagctgcctggctgtgtgtggaaggtgtgtcacagcacacagacatagcccactgcaaacactggggacagagctgtcagttgcctggctgtgtgtggaaggtgtgccccagcacacaacacagcccactgcgaacactgggggcagagctgtcagctgcctggctgtgtgtggaaggtgtgccccggcacacaacatagcccactgcaaacactggggacagagctgtcagctgcctggctgtgccgaagatgtgctccagcacacagatgcagcccactgccaacactggggattcatggatgccaagcattgaaggaaatctcagtttcctaaatagctggcaactcatataacaaaggaaagactttagtgagtatacacaacaaaagatacagactttacagaattagttgagaaaagttactgaataaacaaatagcagcaacaacaaacctagggttggaggatatactttccagatttttcacattatagtatttttttttttttttgagatggagtctcactctgtcgcccaggctggagtgcggtggcgcgatgtccactcactgcaacctccacctcctgggttcaagccattcttctgcctcagcctcccaagtagctgggattacaggcatgtgccaccacgcccagctaatttttgtatttttagtagagacagggtttcaccatgttggccaggatggtctcgatctcttgacctcatgatatgcctgcctcggcctcccaaagtactgggattacaggcatgagccaccatgcccagccacattgtagtatttaaaatgtccaattttcaaaaaatatatgtatgagacatgcagtgaaaatttaaaaagcagatggcatatacagagggaaaaacaaaacagagtcaataggaattgtcctaagaaagcccagatgttgagtttactagcaaaacactttaaaccagttattttatatatgttcaatgcagtaaacactgtctaaaacactaaaggaaagtataagaatatctcaccaaataaataatgccagtaaagatgcatagacataaaaaatttgattctggagttaaaaattccaataatgaaaatgaaatattaactaatgagtttcaataaaggattcgaacaggtggaagaaagaaggaacttaaagacggatcaactgagtttatcccatctgaataactgagaaaaaaaatggggaaaaatgaactaagcatcagaaacctgtgagaaaacaatcatagcaacatacgcaaaagagttatcctagaaggaaagaggaaagaaaggggcagaaagaatacttgaagccaaagggagtaaaagcttcccaaattgggtgaaaaacattgatgtacacatccgtaaagcttaacaaactacaggaaggataaaaccaaagatccacacctagatacatcataatcaaactgttgaaagacaaagagggaatcttgaaagcagcaggagagaaccaactcatcacatgcaaagtagccttaatcagatgaacagctgatttctcaacagaaaccatggaagatagaaagcagtggaaaaggatattttcaaagtgctggaagaaaagactttaagaattctatacccagtaaaaatatctttcaaaatgaaggagcaattaatgcattttccaattttagagaagctgagacaatccactgctggaaaattttccctgcaagaaaatactgaagagtactttaggtgaaatgaaaggagggtaattgggatctataaagagataaagaatatcagtaagtaactacctaggtaaacataaaagacactgtaaatatattttgtgttcataactctttttttctcctctctgatttgagatgcaactgcataaagcaataattataagtatgtgttgatatgcatacagtgtatataaatgtaatttttaatgcaacaacaacacagaggaggagaaagcaaagttatacagggggaaagtttttgtacactattgctttaagttagtatcaatccagacaagattgttagaagtcaagatgttaattgtaattcccgggaaaaacagctttacaagaagtaagtgaagtgacaaggaaatgaaaatggtacagtggagaacatctgcttaacaaattagaaggcagtagggaaggattgggggaagcacacaaggcatgtagaaaatcataaaaagcacctaagacatatagaaaatagcaaactgggcacagtggttcacacctgtattttaagccctttgggaggctgagacaggaggattgcttgaggcctatcgttggaggctagcctgggttacagagtgaggccctatctctacaaaaaaaagaaaaattaggtaggcatggtgactcacacctgtagtcctagctactcaggaggttgaggtgggaggattgcttgagtgcatgagtttgaggctacagtgaactgtgattacactgcactctagcctgggtaacagagtgagaccctgaggaaggaaggagcaacctgttagctgtaaattctactttatcagattgcacatggaagtaggtggattagacactccaatgaaaatacagagattgacagaataaattaataatttggctgtatatgcaagagacacattttagattcaaaggcacaaataggttgaaaataaatagatgcaaaaagataataccatgcaaacagtagtgaagctagagctacagtggctataccaatatcagacaaaatagacttcaaagcattactacatctctacatggtggtgggcgcctgtaatcccagctattcgggaggctgaggcaggagaattgcttgaacccaggaggcagaggttgcagtgagccgagatcgcaccactgcactccagcctgggtggcagagcaagactccatctcggggaaaaaaaaaaagaaaaaagtgttactacagactaaaaagagcatttcattgtaataaaaagtaaactggtcaggaatatatcacaattataaatacatatgacgtatcaatggggccctcaaatacatgaagcaaaaagagacagaattaaaggggagtaatagacaattcaacaaaaatagttgaagacttcggtacccctctttcaataatgatagaaacactagacagttaaaaaataaatggaagacttgaatggctttcgtctgctagctaatggacaccttttttgtgatacccttgtttcttgtgtataattttaaaacaactacataaagcaataattaaaatctgactgacattagacttaataatagagttaataaccattaggcttaaattagacctaatagacacatctataggacactccacagaaaatgaaaagacaactcacagaatgtgagataatatatgaaataatatatttcctaagggtcaagtatccagcatatgttaaagaaactcttacaactcaacaaaaatacaacctaatttaagaaagatcaaaggatatttatccaatgaaatactaaatgagtagacatttattcagtgcaatagtcaaagccactgaggctgggcctgatggccgaaacctgtagtcccagcattttgggaggctgaggcaggaggatcacttgaggccaggagttggagaccagcctgggcaacccatcaagacccaattgctacaaaaaaatttaaaaattagctgggtgcagtagtgaatggctgtagtcccaactcctcaggaggctgaggcaggaggatcacttgagcacaggaggtcgaggctgcagtgagctatgattataccactgcactccagcctgggtgatggaccaaaaccccatctcagaaaacaaaaacaaaaaactaagaaaactccactgaattctgtactttaaaaagataattttatcatacattaattatggctcattttttaagtataaatgcttgtgtccaaaccttcttatatcttgaattgttcagtgtgaaaagagatctaggttgctttttttttaaaacaaagcttcctgaattgtctgttgtgaatattgtgttagcaaacatagattttgaaaatcagcgaaacaccagaacttgaaacgcactctgggcacttaacttgaaagtactacatatgctatttttataattattttttatctgattttccccccgcccactagatttatctcaattgatgaagcatttattgtggcttcttaatagatgtctatttagaagaattataaacctttttaaaaaataagccagctttattgaagctgtaattgacatacaaaaactatatagtttaagtatacaggttgataggttgagacaagtttgtacactcatgaaaccattccgacaatataaagaacatttccatcatttgtaataggctgcgttttgttttgttttgttttttgcccctctgcagttcctcccttacacctcagcttcctctaacctccaggcaaccactaatctgatttgtcactatggattattttgctcactatttaattggattttttaaatgttgaattttgagagttctttatatattccagagataaaagtactttgtcagatatgtggactctaaatgtaagagtggtttccaatactcttaacaaggtattttccagcaaaaaaaaagtttttaattttcatacagtctaattttatttttcttctacagctcatgtttttagtgtcatgtccaagaacatttcactaagcccaggaccctgaagattttttcctatgttttcttaaaaaggtttatagtttaacattcacatttaagtctgcaatctattttgagttttttttgtgtgtgtgaacatgtgaggtttagttcctttttttttttttttttttttttttttttttttttgagacggagtcttgctctgtcgcccaggctggagtgcagtggcacgatcttggctcactgcaaactctgcctcgcggattcacgccattctcctgcctcagcctcccgagtagctgggactacaggcacccactaccatgcccagctaattttgttgtatttttagtagagatagggtttcaccgtgttagccaggatggtcttgatctcctgacttcatgatccgcccatctcagcctcccaaagtgctgggattacaggcatgagccaccgtgcctggcctagttcctttttttatatcgatgtccgattgctgcagccccatttgttgaaaagattgccctttattatccattgaattgcttttgcacatctgtcataattattaggctccacttcaggaggtctatttctagagtctttattctgtttcatttatctatgtattaatccctcaactaataccacacagcctagatcactgtaaatcttcaaatctggtgggatgattgcttatattccttctctttcaaagttgtttcagctactcttttccttttgtctttccatatacattttagaactatcgtatgtatatcaacaaatatattacagggattttgatatgattacattaaacctcgataccaatttgaggaatgttagcatatttattatattatttcagtttgtgaatatgtctgtttatttcttctttgattcctgtcattggtgtttgtaattttcaatatacaagtcaagtacacacttcgttagatttacacctaagccatttgatatggattgtcccctccagatctcatgttgaaatgtgatccccagtattggaggtggggcctggtgggaggtgtttggatgattggagcagatccctcatgaatggcttgctaccctccccagtataatgagtttatacaagagctggttgttcaaaagagcctggcacctcctcctctctctcttgctccctctttcaccacgtgacacacctgctccccttcaccttccaccatgattataagcttcctgaggcttcaccagaaacagatgctggcactatgcttctcgtacagcctgcagaactgtgagccaaataagcctctttttttttttttctcaataagtcagtctcaggtattcctttatagcagcacaaaatggactaacagtaaattggtactgaggagtggggtgttgctataaaagatacttgaaaatgaggaattaattttggaactgggtatgggcagaggttggaagagtttggaggacttagaagacaggaagattagggaaagtttggaacttcttagagactggttaaatggttgtgaccagaatgctgatggcaatatggacagtgaaaaccaggctgatgaagtctcagatagaaatgaggaatttattaaaaacgagtaagggcactcctgttacaccctagcagataactaggctgcattgtattcatgttctagggatttatggaaagttgaacttaagagtgataacctagggcatctggcaaaggacatttctaagcagcaaagcatttaagaggtgacatggctgcttctaacagcctactgtcagatgcaggagcgaagaaatgactcagagtttgaagttacatttaaaaggggagcagagtgtaaaagttagaaaatttgcagcctggctgtgtgaaagaaaaagcattttcaggagaggacaataagcagattgtgtcaggagaggactacaagcactagtggagcaacttctcccaaaagagatttgcatgactaaaagggaggcaagcactaatagccaagacaatggggaaaaggccttgaaggggtctcagaaatctttgggacagaagttcccatcacaggtccagaggcctgggaggaaagactggtttctgaggccagagctgaggcactgctgccctgcacagccttaggacactgcatccgtgatcctggaagctctggctccagtcatggcacagagggctccaggtacagcttgagccactgcttcagagaacataagccgtaagctttggtggtaccatgtggtactaagtctgcaggtgcacagaatgcaaaattgaaggaagcttggcagcttttacctagctttcagaggatgtatggaaaacactgggtgcccaggtggaagcctattgcaggggtggagctaccatggagggcgtctaatagggtagtgctgaggggaaagatggggttggagccctcacatggagtccccaccaggtcactgcctactggagctgtaggaagggggcaaccatccgccagacccatgaatggtagagccactgtcagcttgcaccctgagcccagcaaagctgcaggcagtcaactccaacttgtgtgagcagccacagagagggcacactctccaaagccacagggtcagagctttccaaggccttgggagctcacctctcacaacagtgtacccaggatgcgggacatggagtcaaaggaggttatattggagcttgaaggtttaatgttggccctgctgggtttcagacttgtgtgtggcctattgcccctttcttttggctgatttctccctttaggaatgggaatgtttaccaaatgcctgtaccaccattgtttcttgaaagcaaataacttgtttgtgatctaacaggctcataggtcaaagaaatttgccttgagccttagatgaaactttggacttttgattgagttaatgctggaataagttaagacatttggggactatttggaagggatgattatattttgtaataggagaaggacaagagatttaggggaccaagtgcagaatgatatggtttgggtatttgttccttctaaatctcatgttgaaatgtgatcctcaatattggaggcaggggctggtggaaggtgtttgggtcgtggggatggatccctcatgaatggcttgctgctctccccactgtaataagttcatgcaagaactgggtgtttaaaagaggctagcaccacttgccctctatcttgctccctcttttgccatatgacacacctgctccccttttgccttccacaatgattttaagcttcctgaggcttcaccagaagcagatgctggcaccatgcttcttgggcaacctgcagaaccagaaaccaaataaatctctttcctttataaattacccagtctcaggtattcctttttaccaatgcaaaagggactaatacattggtcttccttcattgttttccttcttcctgttcccattttctcccttccttcattgtcctccttcttcctgttcccattttctcccttccttctttccttccttcttattgttaaaaattgtaaatgttaatgtatatttaattttgatgtccatatgctcattgctggtgtatataaatcaagttgatttttggtatgttaattttgtatcctgcagctttgctaaactcacttattctgtttttgttttgtttttgtggattcttcgggattttctatgcagacaattatgtcttctgcaaacagccagtgttatttctttcctttccatctgtatgtgtttcattgccttttcttgaacttactgcactggctaaaacttctaacagtataacataacataacatagtgttagaagttttagccagtgcaataagttcaagaaaatagaataaaagtagagagagcaaacgtctttgccttgtttcctattttaagaagaaattattgattattttactactaaatataactgtagctataactgttttgtaaatgctgtttatcaagttgaggaagtttgcctttattccgacttttttgagttttataatgaataggtcttgaatttcgtcagatggttttttctgcggctcttgatatgaatcacattattaatattattattattattattattattattatttttgagacagagtctccctcttgttgcccaggctggagtgcagtggcatgatctcggctcactgcaacctccgcctcctgggttcaagtgattctcaggctcccgagtagttgggattacaggcatccgccaccacgcccagctaattttttgtagtttcattagagatgaggtttcaccatgtcggccagcctagtcttgaactcctgacctcaggtgatccacccacctcggcctcccaaagtgctaggattacaggcatgtgccaccgcggctggccagaatcacattatttgatatgaatttttttgtgtagtttttcttcttttgccttttctatttaagttttatattgattgattttcaaatattaaaccagccttaaatccctggaataaaccctggtttggtcatggaacataatttttttgtatatattgctgaattcaatgtgctaacacttattatggatttttgtgtctatgagagatattcatctatattttcttttttatactttctttgtttctgtaagcagggtaatactggcttaataaatgaattgagaagtgtttcctctttcaaattgtggaagcaatggtgtagaattggtgttaaaattattctttaaacatttgatacagtgaaatcgtctgggcttagagactttatttttaagagttttaaaattacaatttcagcatctttaatgttataggacttttaaaattatttattttgtattaggtgagttgtaatcatttgtcttttttgagggatttattcatttcgtctaaatcgtccaatttatgagtgtaaaattcttcatagtactttcttattatcctttgatatctgcaggatctgcattcatatcctctattttagtcctcatgctgcttatttgaatcttctctcttttttctttattagtctcgctaaaggtttttcaatgttactgttctttttagagaaccagctctttgtatcattgattttctctattgcttgctttcaatatcattgatttctgctcttacctctattttttccttcatccttcttgctctctgggaaatttttttttctctttttgtaggttcttcagataggagcttatattattttttgagtcttttccttttttctcatatatgcatttattattgtaaatttccttcagcattgcttgctttctatctcacaaattttaatatgttgtattttcatattcaaaatatatttttaaaaattatcttgattctttctttttgacctacagattacttagaatgtgtgttttttcaatattttagcctttggatattttcctattattcttccattgttaatttgattccaaattatactttgtgttatttcagttattctacatttttgagttttatggtccagagtatggcacattttggtatgtactccatggccacgtgaaaagagtattttctgcttttgttcattggggtgttgtgtaaattttagttatatcttgttggttgatattgttaagtttgtctgtatccttgctgattttctgtctctttctcttttaaattgtggagagacaaagtataaacatctccagctataattgtggatgcttctgtttctcctttcaattttgtaagttttgtcatctatgtgttttgaagtttgatgacacacaattaagattgctgtgttttcttggcagattggcctgtttatcgtcagatattgtctctccctatctatggtaattttctttgctctgaatgctttatttgatattatatcaggccacaacagatttatttagattaaggtttacatgctgtattttgttctattgttttattttcaaatcgtgtgtattgttttatttgatataagtttcttgtagacagcttatagtttggtcatgcttttttgttgctgtttttagtagattttatttttagagcagttttaggtttacaacaaaattgaacaaaagtacaaagatttcccacatatcctgtgtcaccccacatgcataatctctctcattattaacatccctgaccagagtggtacattgttacgattgacaaacctacactgacacatcattgtcacccaaaattcatagtttacattagtgtttgttcttggtgttgtacattctgtaggttagggtaaatgtataatgacctgtatctaccattataatatcattcagaatagtttcactgccccccaagtcttctctgctccacctagtcatcccttgctccacccaactcttgaaaacccttggtctttttatagtatctataattttaccttttccagaatgtcagctctgggaatgtatggtcccacagttgggagcatacagaatgtagccttttcagatttgacttctttcacatagtaatatgcatttaaagttcctccatgtctttttatggcttgatagctctttttttttttagtgttgaataataatccattgtccagatgtaccacagattacccatttacctactgaatgacattttggttgcttccagttttgggcaattatgaataaagcttctataaacatctgtgtataggtattgtgtggacatatgttttcaaatcctttgggtaaataccaaagagggcaattgctggattaaatggtaagagtatgtttagttttgtaagaaaatcctagactgtcattccaagtgcctgtaccattttctgttctcaccagcaataaatgagaattcctgtttctgtttgtccttgccagcatttggtgttgccagtgttctggattgtggccatttcaataaatgtgtagtggtatctcattgttgttttactctgcatttccctgatgacatatgatgtggaacatattttcatatgttgatctgtatgtcttctttggtgaagtatcagttaagatctgtcttagttcatttagtgttcctataaaggaatacctgaggctgggtaatttataaagcaatgagttttatttggcttacagttctacaggctgtggaagtatggcaccatcatctgcttctgatgagggcttcagtctgcttctactcatagcagaaggtgaaggaggaggagcatgtgtagagatcacatgataagagaggaagcaagagagaaagagaaagaggtgacaggctctttttaacaactagcactcactgctcttatgggaactaaaacagtggtaactcattaccaggaggatagtaccaagccattcatgagggatttgccccgtgacccaaacacttccccttaggtgccacctccagtgttggggatcaattttccatatgagatttggagggatcagacaaactatagcaaggtctttggcctatttttaaattgggttgcttgttttctttttgttgaattttaagcactgtttgatgtttttgtataacagtcctttatctgatttgtctctttcaattactttctcccattctgtgacttggcttctcattatcttgaaattttcttttgcagaggagaagtttttaattttaatgaagtccagtctatcaattctttctttcgtagatcatcctttggtgttacttctaaaaagtcatcaccataccaaagtcatgtaggttttctcttgtgttatcttctagttttatagttttgcattttacatttaggtctgtgatccattttgagttaatttttgtgaaggatgtaaggttgtatctacatttattttttcgtatgtggatgtgagttatttcagcatcatgtcttttaaagactattgggacctgtttttctagtctctgccaacgtgtattaaattactttatttaaaactagaaaacctagaagaaatggttacattcctgaacacatacaccctcccaagactgaacctggatacagtcaaatccctgaatagaccaatgacaagttctgaaattgaggcagtaataaaagcctaccaaccaaaaaaaaaaaaaaaaagcccaggaccagatggatttatagcttaattctaccagaggtacaaagaggacctggtaccatttcttctgaaactattccaaacaattaaaaaggagggactccaccctaactcatttcatgaggccagcatcatcctgataccaaaacctgtcagagatacaacaaaaaaagaaaacttcaggccaatatccctgatgaacttcgatgcaaaaaccctcaataaaatactggcaaaccaaatccagcagcacatcacaaagcttatccaccatgatcaagtcagattcatccctgggatgcaaggttggttcaacataggaaaatcaataaatgtagttcgtcacatacacagaactaaagacaaaagccacttcattatctcgataaatgcagaaaaggactttgataaaattaaacatcccttcatgttaaaaactctcaataaactaggtattgatgggacatacctcaaaataataagagccatttatggcagacccacagccaatatcatactgaatgggcaaaagctggaaacattccccatgaaaaccagcacaagacaagaatgccctctcccaccactcccattcaacatagtattggaaattctggccagggaaatcaggcaagagaaagaagtagagggtattcaaataggaagagaggaagtcaaattgtctctgtttgcagatgatatgatcctatatctagaaaaccccgttgtctcagcttcaaatctccttaagctgataagaaacttcagcaaaatctcaggacaggaaatcaatatgcaagagtcacaaacatttctatataacaacagacagagagccaaatcatgaatgaactcccattcacaattgctacaaagcaaataaaatacctaggaatacagctaacaagggaagtgaaggacctcttcaaggagaactacaaaccactgctcaaggaaatcagagaggatacaaacaaatggaaaagcattctatgctcatggataggaaaaatcaatatcatgaaaatggccatactgcccaaagtagacagatttaatgctattcccattaaattaccattgacattcttcacaaaattagaaaaaaaaaaactactttaaaattcatattgaaccaaaaaagggcccttacagccaaggcaattccaagcaaaaaagaacaaagctggagcagcatcactctacccaacttcaaactatactacagtgctacagtaaccaaaacaggatggtactggcacaaaaacagacacatagaccaatggaacagaatagagaattcagaaataagaccacacatctaaaaccatctgatcttctacatacctgacaaaaacaagcaatggggaaaggatttcctatttaataaatggtgctaggagaactggctagccatatgcagaaaattgaaactggatcccttccttacaccatatacaaatattaactcagggtggattaaagacttaaatgtaaaaccctaaaatataaaaacctagaagaaaatgtaggcactatcattcaggacgtaggcatgggcaaagatttcatgttgaaaacgtcaaaatcaattgcaacaaaaacaaaaattaacaaatgggatctaactaaagagcttctgcacagcaaaagaaactgtcatcacagtgaacagacagcctatagaatgtgagaaaatttttacaatctgtccatctgacaaaggtctaatatccagaatctacaatgaactaaacaaatttacaagaaaaacacaaccccattaaaaaaatgggcgaaaggcaagaacagacacttctcaaaagaagacatttatgtgggcaacaaacatatgaaaaaaaagctccacatcacgaatcattagagaaatgcaagtcaaaaccacaatgagataccaactcatgccagtcagaatggcgattattaaaaagtcaagaaacaacagatgctggcagggctgtggagaaataggaatgcttgtattctgttggtgggaatgtaaattagttcaaccattgtggaagacagtgtggcaattcctcaaagacctagaaccagaaataccatttgactcagccgtcccattactgggtatatatccaaaggaatataaatcattctattacaaagatacatgcatgtgtatgttcattgtagcactattcacaatagcaaagacatggaatcaacccaaattctcatcaatgatagactaaagaaatgtggtacatatacaccatggaatactacagagccataaaaagaaatgagatcatgtcctctacaggtacatggatgaagctggaagccattattctcagcaaactaatgcaggaacagaaaagcaaacactgcatattctcataagtgggagctgaacaatgagaacacatggacatggggtaaagcagggaacaacacacaccagggcctgtcgggtggggtcctggcagtgggagagcatcaggaaaaatagcaaatgcatgctgggattaatacctaggtgatgggttgataggtgcagcaaaccaccatggcacatgtttacctgtgtaacaaacctgcacatgtatcccgaaacttaaaatataaaattaaatttgaaaaataaaaataaataaattactgtacttagagtatttacatttaatgtaattattggtatgttaggggcttatgtgtgccattttatttctgtattttgtttatcttttttatattttacctgctttcctataggctatttgaacatttttaagaattccatttgatttattcatagtgtgtcccagtggaactctttgtgtatatataaattattccaatgagtaatactctattgtttgaatattagtcgtttttctaggtattatattatttatgaatagcttattcctgtctactaatgttattttaccagtttgcatgcagcatagaaactttacctccctttatcctctcctgtagttacctttactattttctccacatacattaaaaccatctcagacagttttatactttttccttcaaccaacaaacataacttagaatactcaacaagagaaaaaaagttccattatatttacccatatttttacttgccatatttttccctgctttctctccactcttccttcttttaatgtttcctttcaatctattgaactttagctattcttctgaaggtagatgtggtggcaacacaatcttttagttgcctcagtctgagaatttcttcatttttctttcatttttgaccaatatatttcactgtatataggattctgaggtgatctttttttcagcatttgaaaaggttgtttttcttcattctgaactctgtggtttccaatgaataatactttgtcatttgaattgtttttgcagtataggtaatgtgtcatttttctttctctgtttttaaggtgtttgtgtggtccttaatttttagaaatttgactgtgatgtgtcgtggtggagatttctttggatttatcttgtttggggtttgttcatttctttaatctatagatctgtgtcttttatcaaatttgtgaagtgttggtcattattcatgtactttttcaactccaccttcttcttttatctaggactccaattatatgattattagattttttttgtagtcccataagtctgacttttttttcagtttattttacctttgtttttcaaattgagtaatttctattctatctttgtgttcacaatctccacctgtaattcttagtaaagcaggttatatgtaagatgagaatgttttagagaacaactcagcatgaaaataatcagatcatatttgtggcaatacaggatgtaaaatatggggatcatagaatagaacttaacagttctttcaacagttggataatgcaattagtacaactttatgcaatgtcttctttccactgtatatcttatttttaatatgattattttgaaaaaacatactaattatataatattccattttatgtataagcaatgatgtattgctgggcagttaactttgttgataatattgcaagccctataaataacattataatgaacatctttgggtttctatttttgttaatgatcactgttttttagtataatttcttaaatgtgaaattagtagctcaggctgggcatgatggctcatgcctgtaataccaacactttgggaggccgagacaggtggatcactcgtggtcaggagttcaagaccagcctggccaacatgatgaaacactgtctcctactaaaaatacaaaaatcagcctcgtgtggtggtgcacacctgtagtcccagctacttgggagaatctttcatgataacctgactttctataaaatataaattaggacaaatgtattccttggtgctatggtttaaatgtgtcccccaaagttcatatgttgggatcttaattcctaatgcaacagtactgggaagtgggcctaataggaggtgattagctaataatgattaatattgttattgtaggagtgagtattgtgagagggggagataaattatctcaagagtggatgtgttaaaaaagtgagtttggtcccctcttgctctctctcgagtactctctagcccttctgtcttccatcatgggatgttgtagcaagaagccccattgccagatgccagcactttgaaattggacttcccagcctccagaactgtgagaaataaatttctttataaattactcccttcatgatattctgttacagcaacacaaaacagaccaagacactttatcaaattgcaaagaaacattgttgttctaggttataataaatgtaaaaactagtgcaaatttattttgggctacatgtgaagggatgagataaggagggtggatggtgtgggacagaaattcaactgttaactattatatagattcaaacttggacgtcatctacacatagcaatttattcctagccagttcagggtttataatgaaaaaatatttccctgacatattaagtggctcatatataacaaaaggtcatttatgaaggaaggaattactttggaaatttatgcaaactatttaatcacttaaattatgaaaaagttccaacgcaatttggttcctgattttgtgataggaacatttttcttggtaattggtgtagtggcctcatgtcaggagtcacttcattctccttttcagaagaagaaaagggtttatgaatggtctgtatttgattttttagcacctcactattcatcagtataagccctagattagatgggcaatggaattttgggctgaagaagggagaggtatagttttccttgtgttaaaactctgtttgattaattagaatgaactgccaaggtgtttctggacaccagtaatttattatcttcctacaagtctataagagaaggattagagcctaaaagtctgtatggaactcgctatttataaattttacagaaaaacaaacatgttggaaaactgcaagtttaatcagattctacaggacttcttagaatccttgtgacagcaatatgaactaagaattggtaggaggggttatagttctttctgtttaatgtctgtaatttacatagggctctcttagaccatagatttagggtgaccccagcctggtttcacaaggtaggacttccattgaattctctctcaccagtgtgttcctcgtttggagttcagcactggggactgactgggcggcaatgtgcatgagcacatacagtctcagaacatgcactttgggcaaagagcagagcccctttaggtcagggttggatttaccgtggtggctccagtagaggactgaagctttggcatatcatgttcaatgttccttcctctccatcagatatttttaataaatgtgcaagtctttaataaatgtgaatcaccagtggtggacattttgtccaagaattgtcctgaagaggaagacagtttggaccagctgccctgggaaactcctcaggctactttactcgagtgcagcctcgctgactgctcatgctagtgcattagaaggtggccacgaggacaggctggcgctgcctgcacggcctgcactcatacctatgctcatcggctgacctctgactcttttttttttttttttgagacggaattctgctcttgtggcccaggctggagtgtaacggcacgatcacagctcactgcaacctccgcgtcctgggttcaagtaattctcctgcctcagcctcctgagtagctgggattacaggcacccaccaccacgctcagtgaatttttgtatttttagtagagctagggtctcagcatgttggccaggcctcgaactcctgacctcaggtgatccacctgccttagcctcccaaagtgctgggattacaggtgggagccactgcacccggcctccccctaattcttatatttcagcaacatgtccctgtaggtcacttctagtagtctttgctatttaaataagcttaggagcatctgcaaacttagaaagtttcctgcctttgagataatttataaaaatatcaatgttgattctggcagaaaccccccatgtaggccctttatcccaattaatgtttttcaaacattagagtgcctgacattgtgatagatcattagccgtctctgctactttatatattttctgtatctttatccttatgcatacaaagaaacttagcaccatattccattcattctaagatgcacattagtttcacattttaacttttttatttaaaatcgggcatgtcttacagttgaatagcatcttagatttgatgacatgtgaaactagaataaatgcttagaggattaacagtggaattggaattatcccttgagtgtatgttaaaaataacctgaaaagagtttgtatttaaaagtattttcagagtttcaattatgctgactccaatttttgtatcccattcttctgaattcagtttctccttccaggaggacacctgatagtaattactccaatgaagtagtgtcagtaatgacattgtctttgtttatctgaaaaacgtttttcttttaactttactcttggacggcagtgtagctggtcttagattccaaagttgaagtccataattactttccataatttgaacatgttacttcattgattcctggctgctcttattgtggcttgccatctgctccctggccagtcgttgttaccctgtggataaactgtttgattctgtacttttaagatattctttttcatattctatcgttttactacaatgtgacttagttaattttaaaattataaataaacatattataaataaactcccttgtaatatcttcaagttttctttaaagataaacacttttggccaggcacggtggctcacgcctgtaatcccagcactttgggaggctgaggcgggcagatcatgaggtcaggagatcgggaccatcctggctaacatggtgaaaccccgtctctactaaaaatacaaaaaattagctgggcctggtggcaggcgcctgtagtcccagctactcgggaggctgaagcaggagaatggcgtgaaccctggaggcggaggttgcagtgagccaagattgcaccactgcactcagcctgggtgacagagcgagactccatctcaaaaaaaaaaaaaaaaaaaaaaagataaacacttttatttttcaagtttactttaacagctatctttaaagaaaacttgaaggtactgcagggagtttccctggaggccacacagtttcccctgtgagtatcctcttgcatcagtatgatgctgtttgttacaattagtaattggatattcatagatattttaaactgaggtccgtactttattcacattttattggctttttaaatcccatttcctgtttctgttccacgatcccatccaggagtccatgtagcatttagtccttgtgtctttttaggctcctcttcattgtaacagtttttcagcctttccttgtttctgatgatctcgacagttttgagtagggcactggtcagatattttgtaacatgtctcttcattgggatttgttggatgtttttatccaagttagaatggagtaatgtgttttggggtagacagacagcagagtattatatgttatcatatcatatccagggtgcataatatcaatatgacttactgttgctgtgggccttaatcaaatggcttaaaatggtattcgtcaggtccctcgactgcaaagttactctttttcccctatttatatactgtactctttggaaggaagtcactatgcacagcccaggaagtcactatgcacagcccaaattagggagtggaaagtagtgtttcacctccatgaaggcaaagtgtctacataaattgaaattcttcttcatggagagtttgcctccttcaccccatttatttatttaatcatttatttatgttagtgtggactcagcagtatttattttatattttggagtgtaatccagtattaccttattttgttgttcaaattgtttactgttttttaccactaggtacttgttaaatttgctgcagtatccctctggcttaacagcactggtgttattttatttttttcactcattttccttctttctggctctacagtatgttccaggttcatctggtatatttcctgcccaacacctagaatcagccctttctccagaaatcctggttccttgtattggtgaatgattagaaagcaaggtttgggtgctaggtgggttcattgccattggggcgtcatcatttctaggccctttctgacagagcaaagagttatatgtgtatatagtagttcatatatacagaaatatctgtaagtatttctgtatgtaaccgtatgtatccttattaagctaaacgtgaattcatgcttaagtctccaactctcactctaaagtgagaaaactgatttctacacatggcatccatttacttaactgttcgattgcaatatacatgtacagtagtttcagaattggtaacttacaactctgtgaggagcaacttcatcaagtagagtgcaatgctgatacacagttccttgcagaatacacccagtttcaaagttacttagaccagcacctttttctcccagtcacgtcagtaaggtcgttttatacttttgtaatgcatttgaatccttttgttacattttgtattccattctggatcaccgaatctcctaagtatttgttttgtattttgcattcattttgggttactctttgtattataaagttctatgagttttgacaatgcttaatgtcttgtattcaccattacaatatgatacagaattctctgccctagaagtactctgtgctccatttgtctactcctaacccccaccactggcaaccactgataaatttacagtctctaaagttttgccttttgtagaatgtctttttattggaatgatacaatatgtagccttttcggcctggcttctttcacttagcactgtgtatttaagaatcacctatatctttcatggcttgatagctcatttcattttatacttgaataatattccattgtgtggatgtgccatggtttgtttttccattcacctgttataagacatcctgattgcatccagtttttgtgattatgcattaggctgctataaacatgtgcaggttttctgtagatatgtgtttttgaatcattgggtaaatatctaggaatatagttgttgtatcgtatggtaacactaggtttagttttgtaagaaaccgccaaatcgtcttccaaagtggtggtaccattttgcattcttaccagcaatgaacgagccttcctgttgctccccatcctcccagcaattggtaatgtgaacttttcagattttagcctatccgataggtatatggtggtattgcattgttataatttacatgtccatgataacatgatgtgaagcatcttttaatatgtttatttgttatctgtacatcttctttggtgagttgcctgttcatatcatttggccattttttagttaggttgtttgttaatgtattgctggtttctttcctatattttgaatataagttctttatcagagatgtattttgtaaaattgtatcccagtctgtagtttttcttttcattcttgtaacagtatcttccatagagcagtttttaattttaataaagtccaacttactaattttttctttgcatggatcatcatgcctttgctgttgtatgaaaaaccataatcaccaaacccaaagtcacgtatatttaatcctgtcttttcttctagtattagaattttatattttacatctaggcttatgatccattttgatttaatttctgtgataagaataagatctatgttgaattttttagacatttattttacttggtgtctactgagcttcttggatctatgatttgtgtctgtcaatggtgttgggaagttctcagccattattctttcaactattctttctgctctgctctcgcttttggtgattcaactatatatgtgttatacctttcaaaattgttccacaatttttggataatctgttttttttttctttttgcaattcagttttggaagtttctgttgacacattatccagctcactgattccttgcttggctgtgtccaggctcctcatgaggccatcaaacgctttctttcttttttcttttgaaactttacaaggcttaaatttcatttaacttacatttttgacacaacatgttcaaattgcatacaggcattctttatttctgttacactggttttgatttctagtatttccttgcaattctttctgagagtttctgctgatgttacccaactgcttttgcatgttgtttatttttcctttagcacctttagcatatttatcacattattttaaatttcttatgtgataatttcaacatttgtatcatatctaagtcctgttctgatgtttgctttgtctctgcagactgttttttcttgtcttttaattgccttgtaatttttctgtaataaagcagaaatggtcatgacattatgaatttagataagtagctttttagtgtgcgaattcatgtgacaggtagtagttgggctttatttgatgtttgctatagctttaactgccagagccttcaggttcttctagtgttcctgtttttgtcttccctcttgatgtctgtcttccttaattaagtactctttctcagagaatctacagctttttggactgtagttcacagtagttatactggacccctgttggtggggtggtaggtggggatgaggggaagaagtgttctgtaatcctatgttacatggtagcattgtagtaggcctgtgtgtctgggctctgaccttcacaagtgtttctctagtggtatagcagtggtatagctttttcccttcttaggtaagacagaaaggctacaggctgctggagtgggaccagtgtaatttccctagcagggataagctctgagaaaccctggagagtaggcttttttgtggagaaggctctgggtgacctgtttcccagtgattacttctccccttctcttgctggagccacaaggagatcttccttgcacatttactatgagaacctggtggagtttctagacataaaacccatgaaattgtagagacctcagcaagactgtggctgtctgggggcttctcactctcattcattgctggttcacactcagcaaccagagattcactgaaattaccatttaagcattaccacaagttcatagctccagtggcttctgctttgagtgagcagattttggctgtgccctgaatttcatgtctctccatatttcagtgtggtacttaccctgcagcagcagtccctcctgagtccaataaatgtcattgatttttcatttcattcatttttttttttctgttgttatgagagtgattaattctaagctatttacatgccagagctaaaaaatgatggaggtttgaattagtctttgatttatacttatatttttgaggaactcatacttccttaatctgaggaaaagttggccaattctggaaatttctcagccattatttctttaacctttcttttatgaaactattttatacacacattgaatcttttcattgtgtccttcaagtctttcaagcattcgcattttccatctctttatctttctgagttacattttaggtcattttgttgagtctgtcttcagcttactaattatcatttctgttctttccaattcattgtttaacccacccattgagcttttatttcagttactaaatttttcattttgtaaagctcttacttttgttttcttccaaatctgcgtttttacccctagaatatcttattcttttactatgtttttgatttctgtagtgcatttaatcacgttaaacatatttattcagtattatccctctgatatttctcttgtctgtatttttgggggcttattcctcctgacttggttttctctctttcactcatggaaaatgttatactttatgtattttgtatttttgatcaggagggtataatcattgtgttttctatgcaacaattttttattattattttctttcttttgtcttttttgtggtttgctaatttgtttgttctcattgcgtctgtctgggtcctcaagttttactggtctagaacaacttctaagctaatgccatgacttgcaaagttcctaggctttgtgaattggttacatttgaattctccatcagaaagaaggctgatacattttcaggaaatagagtgtaccctgacctggttctccactttcagcccagaatgacacagactaacttgcttctttcttggccaatggtctcttcaaatttcctggaccatgctggtagaagtaggtggggggtttggttcagctctccacctacgaaagagaatcttttctatagtcccacttaggcattgtttaggctctctgtgaataacactggccactggtctccatactcctgcactctgctatggtgtcagctcacgtacttacaatgttcttttcaatttcctcttggattttgttgttgttgttgttttgaaggatttcttgtgctttcttgtgagccaaaatcagcatttaaaaagacatttgtttgattttctccagaatttccaggtgtttgtagcaggatagtattaacattatagagtctcctgttttctaggaccagaagcagggcccccatgtattatcctggcatacttaactagtttctctgtgttgtagtcaccatttcagctctagctatggcttctttgtttcacttccatttccaacttctgtaatggatgtaatctcttggtgtgtttgctctgcagacactgtgattatcttacaccgtggttatctcaggtcctgccttcatgccagtaacttaattttttagctgtgtctgttttgttcctttctgtttctcatctaactacgtaataatttgttttggttctcagtttatttgtttagctctgcaatgttccttttattctgttattttattagctcatctttgaaatcatgcttaatttgatccaagacttatatagtataatataaagaactcatgagaagcatgcccttcttatttgggcttttttccaggctactttgtatattagttgtgtgtgtatgcctggctgcctttcttctttgtgcttgttattttaaaatttttatttatgtatatatttaatcattcattcattcatactcatacttccttcttgtggctgtcattccaatttgttttcatctggcccatgcctcattcgtattttctgtgatgtagtagagatgcattatttttatgttatactttcctgattcgtggcctgatttatttttgtctttgtttcttaagccaattaacctatattatttatagaagtattagaaatatcaaataacaaaaacaaaaccaagaaaaataaatgactgcttctaaatcctgctcctaacttccattcattcatcttatccccttccctttctattggcctttggaacccactttgcaccggttccataccaagggctctgttggggtctccttatctctaactcagttccttagaggaccccaattgtgatgagatttgttgcagctagctttttgacaattcattgaaaaagcctgatattgaaattacagaaattttgtaaccaaggcatttgtgggagtctggctgtgtgtataggtgtttgcttttagtccagagagatacaacttgtaaacactcaaggaaattcctgaaaactgattcagttgggatgatggcttaaacttaaagggagatttatcctttctgttcaagggtagttcagatgaagtttgattcctgctccactcagtatgccggaaacccagcatctctcttcctctttctcctctactccacaatcttcctatcactacccattgtcagctctgctaattcaagatcgattccttctctgttagggtctgctctcatgatccaccttccaggcttcattccccaagaggtaggtcctttgagggagatagggggccctttctcatagaaggaaaggaaacctttcagttgcagtgaaaagtgcatgcttgaactcttcctccctccctgagaaggatggggcagctctgggcatgggagtccacccagcgagaaccaagtggacatcaggttgggtggggctcacctcccccgggcaagctctcttattcctgcacacacaggcagctgaacaccttggtctgccttgctcccttcaatctggcattgggcaaattggatctggatttcacaggggaaacaaaaatcagtggtgttgcccggatccaggtcctaagctcaggaaacccacctgcctctgttcacctggcatttattctccctaaaggagccaggctgatcagccagttttccatcttgtcatcatgggtctttcctgggattatgtctcaaggaatcacatgctgacctgttgggaggaaaaaaaatatgtatataaatatacatgtattacactgtggtctgattttttaaatcccttaagccttatacgttgcattgttcttgaaatcagtgttctcgaactgtgcaggattaactttggtagttaaaaatagaatcaaagagttcagaatcactctgctgggggagttctagaggcagaagtttttccaaagactgcagtctctgcctcagtggctctttggagcaacatctccaatctcaggatcttcggggtgctgtgttttaaagcataatgcatttcctctgtttgtcaggtttaacggtaccgtcagaaataagcatatatctgtaaacagttcggctgtgattaaggagctccagaatcctagaaatagtgaagttccttagcttaaccctttgccaaggtggctagctggtggatgaggccaggatccaaggcttgaaggaagtcaggttgcacacactttttgaaaagattctcatctgcacattgatgcatcgcagaataaccatgaacccactgggaatattaaatgctgacctctagacacttaattcctaagccttaattttcagtgggaaccaaaccaaccaggtttcaaagatgagccaataaaataacagaataaaaggaacattgcagagctaaatgaataaactgagaatcaaaacaaattattacacagttaaattagaaacagaaaaccaaccagtaattatgtgccacccctaaaaataggcagccgcagatagtgaggagatattgccagttcgggccaattctcttagccttttcagtacctttctatcaaaggaacttttttccgataatttaacagtggagaattttgctatattttaggcacttttctttttctttttcttttttttttttgagacagagtcttactctgtcgcccaggctggagtgcagtggcacgatctcagctcactgcaagctccgcctcccaggttcgtgccattctcctgcctcagcctcccaagtagctgggactgcaggtgcctgccaccgcgcctggctaattttttgtatttttattagagacggggtttcaccatggtcttgatctcctggcctcgtgatctgcctgcctcggcctcccaaagtgctggaattacaggcgtgagccaccgcacccagctcttaggcacttttcttcctgctacctattcagtccttgcagcatgctgcagagagagcaattgatagccattacccttgtttttacaaataagggaactgagtctcagaaaagttcaggggatgggactacccctagcccacatggctagtgaatagcagagcccagagcctgtgatatctatagttttcacattgtgtccccaacaaacagaccctgagcaatcccaaaatgtgagcagaggtagagccgagctctgtatcccgagagggccaggccctgtggtacgaggaccaggatggtcctagaaatgccaagctccccatcagcagctctcagacatccaggcttcaggactccgttgctctccttaacgttattgaagatcctctaagttttgtttatgtgattatatctatcaatatttaacacattggagataaaactaagaagcattttaaagttcagtaattcacttaatataataaggccattccataaatagcaagatgttaacataaatagcattttatggaaaataaccatatcttcacccaagaaatcagtgggaagggtggcgttgctttttattgttgcaaatctccttaatgcctcatgtaatagaagacatctggactctctgaccagcttctgcattcagtctgctgctggtccctatgtcctgtagcctccgcaaacctctatggaagactcaagggaaaagggggatgaaagagggaaataacgtctaaccattatgaaaaaaagatttgactcactggtcctctgaaagcatttcagaaacccaggggttccaagcccatactttgaaaacttctgtcttgtacaattaccaaagggaattattttccgtgatcgtaatcacagtgtttgctgttacaacaaggaggacagaatcacatcatggttcaaaacacaagtgttgaaaactaaactttatgaaactgaaatccaaccccctaacctcttaaacaggtttctgtacttagctgtgtgacctagggccaggagcttgtttgtttcataattgatatatttatgcattcctcttctcctttgattataaaggtaatacctgctcatagcaaagcattcaaacagaaaagagacatataaaattaaatttggggggtctcccataatctccattattaaatgagaaaaataatagtatttattttgctggattattgtcgtgaagccaaaatgcgttgtttgcgtgtgcatgtgacatttagaaatgcaaactctgtttaagggttagctttgttattttcaggtatcgtcaatacctgatacctgatatttattgatatcctcttggtaaagtacttgttcatcttttgcccatttttctattggattgcctgcccttttctgattgattttttggagtttatttcttattctggatatgagtcttttgtcagacctactatcttgctgactcagggaaaacctcagtttgttatgctgtaaaactaagaaaaaaatatggttggtgtaaagattaaattagataaaagaagtcaccgtttataaactttagactgctacacaaatatgaatttatattatccagctattttctctgcaaacaagaatttagaaatggtggtggttaggtctattgttatgtttttgcttttttttttttctcagcatctacacaaaggaaaaagaaataatgtgatgggagctctgtaaaatcacatggaatgatgttacccagtaattcacgaaagaataattgctgcagaaatgcaagatagcacattacgcattaccacgacagttgtactctaaaccagatagacgattattcagagagattgattttaaaaagcacgatcacttaaatcaaagcatgctctcaactgaagagctcagatggaaaaagaatgaagggagttaggcgcgttgactcgagggtgccttgccacaccggccttctgggattctgtggcgggctggggaccctgcctcctcctgtcttcatcccagagggagaggggagtgtagatcttgcaggagagccgtgtgtgtgagtagccacgtggtgacagccattggcactgagtgacatcgcacagattgcagcatgctcctcctcttcccacctgctgtagcagacagggcagctgtttgcatccctgtttcggaggagagaacattgaaatgcacagaagccaattgcctgctgagtcgggagcccccagggtcttttgcctgtgtggactctgctcctccatgccctcctgcccagttggggagggcaggaatagccaggggggcagcttgaggatctggaattgctgaaacccactttcacagtgcaatggtctgaatgtttttttcccccactaaatgcatatgttgagatctgaatccccaaggcgatggtattaggaggtgattagtccatgacggtgcagtcatgatggatggtccccatatatacaaggccccagagacctcccgcgccccttccaccatgcgaggacacagtgaaaggtggctgcctatgatccgggaagccagcccccaccagacaccagggttcaaccatagtggcaggttaatcatggacttccagccgccagaactgtgagaaacaaacttctattttttataagctacccagtgtatgatattttgttataagcgtccaaatggaattaaacatagagtctgtgctacttaattgcaggcccctaggttcctgtggaatactgttcttcgggagactaaatgtgcatatttattcacaggcctctgggccagggttggatgtttctgtcccctctcttgcaggaacccccttgtttgactcgggtggcctccaacttgggagggagtgactgctgtaggcagctctgcctgctgattcatggtttcaggctcaagtgctgcatggcaggctgggggctctggcagcagtgaaggatatttgggtgaaagagaaggaaacttccctcctggggtgaggaactggattttgtccctaggtaaattctgggcagtgggagtggagcccctgcatacctgccctgaatgtccttctgccgggggccagagggccatgtgggaactataattccatctggggactttccacactcagaggtgtggccaccatccccaggtctcccagttcacctgcagcctgtgtggccaagtacaaatcccgaggcaaggaagttgagtgcagagctgaagtcctcccccaggtcctctgtgcagaagcctgtcaggaagcagggggctgagctcagctttagtgcagcagggtcgggacgtgcttgccaaggatcgaggaaggaaaaggctgtggggaaaggggaggggacagatggactctgaacctgcttttggagcagcctctggggagggagggcttttcttgccagccggtcaaggtcttataggagaagacacggcacctgcagacctattgctgccagagtcccacagaacctctttgagaagggggaaaggggtcagtcaagagccattttgcaaatgaggagactgagtcctgcagcaactgcctctcatctgtggtcacaggcgtgggggcctggagacagtaatgcctggatagagccttggaaagcagagctggtggtgggaaccgagggataaaggctcaggactgggtgcacatggtggatgtgaggggatccacatactgtggtattgcaggatcacaggtggttaaagcagaggctcagccccaggacgccaccccttgtcactctgggtgaagtccatgtccttgtcttcctccttgtagggaccctgttttccctccctccgtgatccttgttaccatttgttgttatatgttgttataagtgtatcattattgtgttgtagaatcctacctcatccccccccaccaacacacacacacacacacacacacacacacacacacactttttattctaggagctcaggagcaatattaatttccactgcacacatcaggcaagcataatgctggggacaggaggtgttccataaatgttgcatgaacgaatgaatgaaaactcggctggaccatggcttgtagcaatggcttgtgcacttcactcaagattcttgacttgatcctttgggcagtgcagttggaggagggtgatctgatcatatggatggtcagaaagtccggtgtgaagatgagtagaggacagcctctgtgtgtgtgcacctgcgtgtgcataggggcagcaggctgcacagtgggaatgggaaggaggtgagggaccttgtcactgcaaacagagagccaagagactcagaccgtgtgtggcccggacaggtgccaagaggagggagattgttctgggagcatggttcctcatgccctcctctctccctcttgagtctttgtggggggttcccctaacgggtatccctgcatgctcaggtggtggtggctgctgcttgttgattacagtttgaaaagctgcacttggtcccaagttgccacacaccactgaaattcagtgttctctaatggggtttctgttagaatgttggaaggaagaaagccttttaattagattcgtagtaattgagctcccaaaccacagaagcctttctctcagcagatgaagacacaaatgcaattaaaagaaggaaaggcacctaaatggaacccttgctaattttaagtccattaaaaacaacaactccttaataagttgaggcaacagatacacgttctgaagagttttaacagtgcttcccaataatattggagcttgaactggaactggagtgctccagccacttaaatggatagctctgttggggatcatttgctcagtgcagagtacagagacatgttagctctacagcttttcccaccaaaaactcctggcacattttattaggaaaatgggatatattttttcctgtaactgaataaatgttcagcatcttgtggacattgcctctggcctggggtcccctgagacatcatcccatgtccctccccaggcagccctctcctctctgtgggatttgccccacctggcccatctcaccccagaggtgcccaacatgtgagcaactgggctggggcactgatgtccctgtcaactgcttacatgctgaacgcattttcattttaatgagaggcagcattcgtttttcatttgcatccctgctcactgacatgccccagcagatgccacgttctttctgcctttgggtctttttttttttgaaacttcccatcggtgaaccaggccaagtagattctattgcgggagcttgaggtttcagcttctgggaacatcttcacaggggcattaattaatattttccctggagagggtgtcaattgctaattcacagagtcctttacgttggagttgattatttcatgctgaatcacaacattctcagtatgactattgtacagaattcactcatttgcctcctttcactgggcttggtcagccgtactaaaacgcaagttgcctcccatttggaaaggccagtcttgacgggtctcttctctgtacgtcctgtgctggagcaaagtcacagctggtacactagccaagctccctgattagtgcataggcttagctggaggcagaactcagggaggtgttttggaaatgtaggaaaataagctctggagtcagaaagatccaagtttgaatggctgcttctaaagtcacctcatctttctcacctttagtttatcacctgggtaggctttaccttcaggtgtatttcaagagcccgatgtgcctcctagaagttagaggttgagagaaaagcccagatctgcagggacaaggcagagtcatggccctcatggcaccactcacacagggtgcagcagctccacacagggccatggcccctttcctgggggagggaggcataacatacttgtatttgtttaaaagcatatatattttggaaacaaacctgactttaaaaacttgtattttcacctacttttatgtttttttttaagcatatgaattatttaaaaatacaaagataaatagctaaatcattagcaggcatcatttctggatggtaaggttgcagagttttaattttcttctttatacttttccatcttttttaagtgctgtataataaatgtgtcttactttggaataaatagaaaagcttaactctagggaaatgctgcttgcatatattggaagtgcttggtgcattctaatttccacacacaacaacgctctcgacagtcagatccccatgtgaataattgtctcattctttcttttgtaaaccatattatttatgctgctgctttttttttttttttgaaggatgagaagaaccaagttttaaccaccaacatttggctgcaaatggtaagttaagagaatgacaatctctcccatgggctgcaagatcttgcacccaagattcttgttctgatacctgagatgcttgcttctgagaggtcctgtttaggaaaaaaaaccaaaaaaacaaaaggccatggctgtcacaccaactccacacctgccaacaatgaatgctggctgtatgacactacagtctgcagtgctcaacacatgcacaagatcaacacataggacaaggtaatgtggggacacttcagaagcacttcaggcaagacaagaagatacagggctgtgtgtagatgtccacaacctgcaccacagccagtccccaggactcagaagctccatccctgccctctgtggcctccggagctgcatgtttgaatcaggtggagtgttccgaaaccagaggccctcgtactttgtgctctagcaatgcttataagaatcttgaaatgctacctatcatttgtagatttttaacttgacatctgcaatactaatctaaatttgattaattgcaaatgatgccacttaacatccaattgtaaatattaacactgaaaaatgaaacagtcagtctctattttaaatggaattcaaaataccataataatttggtgcccatctcattcaaacaccatatgaacaagcctttttttaaactgtcagatatttaacgtagtcccttttttctctttgcacatgcatttctattctagtttctatacggaattttatcctaatgtaatataattttatgtttgaaagtctcttttttgtttgtttgtttgtttgttcgtttgtttgtttgagacagagccttgttctgtcatccaggctggagtgcagtgcagtggcgcaatcttggcttactgcaacctccgccttccaggttcaagtgattctcctgcctcagactcccgaacagctggaattacaggcaggcaccaccacacccggctagtttttgtattttttagtagagacagggtttcttcatgttggccaggctggtcttgaactcctgacttcaggtgatccacccacctcggcctcccaaagtgctgggattacaggcatgagccaccgtgcagggccgaaagtcttttattaatcgtgccttggttttttcaaatgtaaatatttacacaagaattattcctttacaccgtaagtattaaattttgtttcttttggattgatttaagtttgctattgttattggtattataattcatcaaggtgacataaattaaaatttttaagtaattataaaacataaatttttattggcaatttatatctctgcccaagatgagtttgttttaaattagttcatgtatccacagatgactttttattacttgaatggagagaatgatagttttcacttcaattctgttgctgttttttaactaggtgtagtaacatgagtagttggacatgaaagccactttgttaaagcaatgttactcaatctttgaacttcttctaggttatatgccaaaaataatgtagtttttatcaaatgtatcagctgacagcttgattagtttctccttcaattttgttgaaaacaaagaaaagaatttaaacccacctgacctttgaaagtatttgccacccaatttgtaaggtaattcacacagacacaaacgctgatacttgaattgaccatttgtttggttcttgagtcagtgtcccaagatgggagttgaggtaagataagagaaatgtgcccttctttataaagttgaatgggagaagtgaaaatggaggcaaaggatagtcccatgtggttcttgggcagttgagttatcctgcgaatacacgtggagttgagggatagaaaatggatctgcatccagcctggccaacatggtgcaaccctgtctctactaaaaatacaaaacttagctgggtgtggtggtgcacacctgtaatcccagctactcaggaggctgagccaggagaatcacttgaacctgggaggcagaggttgcagtgagctgagattgcaccactgcactacagcctggggaacagagcaagactcaatctcaagaaaaaaaaaaaaaagaaagaaaaagaaaatggatgtgcttaaagccattgctaggtctccaaggtgcacccatagctacatgtgagactcctgcagaacctaacattagtcaggtgagagcccttgagatattcccttgcaggatttaaagcagcatacttcagtgagcatatcccttgccacctactctagcttccctccttttgcccaggacacatgatctgtgctctcctggaaggcccaggccttcttcccatggacagactcatctcctggcccctgctgagagcctggcattaatgattgtcctcgctgccagtagcatcaaaatagtgtccgtgggtcattctcactcttgtctctcccacagacttttcatttggataaatgttaaagccatggatccattggctcaaaccaaaaaccttgaagtcacccttaactcttgtctcgcacaccacctctgatacatcaacaaatcctggcagcttgacctgcaaaaccgatccaggatctaactactgggcatcaaccatgatgctttcaccctggtctacatgggtgtcatctctcacctccattattaggagtccccatccagccttcctgcttcagtgttgcctcttctggtggtgtcttgtcctcaacatagcagccagcatataccttcttggcacagatccctccaggggctcctgtctccctggacagcataggaactgaagtcctcgaagtggccttggattcaattccctccttgcctggctcctttttcctctcccctcccctctgttctttgtttcctggctgcactcactgtccacttgttgggtgacacacacgtcacccgagcccgtgccccccgctcagggcctttgcactggctgctctccctgccaggaagactcgtccctaagaaccacttgatttcccccttacttctcactgatctcttcctaaaggtcaactcttcattgagtcttctttgagctccgatgtactgtcccaaaccctcccctccacctccagcccactctgttctctttatcctgtttcatttttctcccaaaggcttctcaccatgtaacccgctttgtgttcactcgtctatctgttcattggttctgagtcttcatcacccttagaatgtgtgcacagtgtgggggacagggctccaggtgcattcggtcactgccgtacccacagcccctagttcactgtctcacctgtagcgagcaccaaagaacttttgccgaatgagagaatgaagcaaaaactcaaggtgaaccttgaggtgcttgggtagcgtgacacaacataaagccatctcctgaatggccgtgcagcactttcgtactgtgtgtataaggccaggctccggagaatgaggcaagtgcttccctttttaattaaagttggacgtttgccatgccctctaaggaacaacgctgctgttgacatttttcttacagagagaaatgcatgttatggagaggtctctctccctggtgcctatcttccttagccctcagtaagtgactggtcttcagcaatgtatatgatttggcaattttatttaaaggatggtggtttccaagaaaaatgtaactggattattacttccagtatggaattcagatgctccacaaataaacatccttgcttcagagggtgtcaccagagacctctaaatttatttcaagcacagctaattttaattaaggcttacatttgcagaagcatctgcagcttcatttgtttgaaaactcaccttttaactcacctcctcttggagcaacctactctgtggaaggtattaaactgggccaggtgaggggacccagaaatacataacccagtttctacctttaagccatttatgatcaggctgtgtaattaacacgtttagaagaaggaggcggaggagaagaagaaggaaaagaggaggagaaggaggaggaggaaaaaaggaggaaaaatgaaggaggagttggaggaggtggaggaggaaaaggaaaagaggcggaggagaaggaggaagaggaggaggaagaggaggagaggaggaaaggaggaggagaggaggaaaggaggaggaggaggaggaaaagaggaggaggaggaaattaaaatagcaagaacaagtatctccccagggatattacagatgacagctggtggtcagatagtagaggccagacgtgggagaaatctctgctttaaagaaatgggagagaaggagaggcacaaattctcctaaacgtgaagatctgggagcactggcatttctgagtattttgtcattaatgtttacttttaggtgcctaccgattgagaaacatgctggattcccttagaaggtgtgccctcataaagctgggtgataacatttatctggaaagcggcacctgtagatgatctagcagttgtaacactgtctcccaactgaatttttaagggctcacaagaatcctgggtttaaaacaaaccttaacagtcatctagccagtgcctgtgtctctctgctccccgcccccacccagtgtttcagtctggaagccctggcatttctattcatgtccacagcatggacatgaggaactcaggagtcaccagagcaagcttggatgctgcccagaggccacttctaagcaaccttccattgattgctgttcttgtgttccctggctggggaccagcctggcttgacccagcacgataatggacatgcacaagtgaagctgggtactgaaggctctcagggccagggttctgaggggggtgcaaatgtgggccgggggcagagagccataaaaacggctctagcaatgggtttttctcctcccgagtttcatgttgctgaattcctgtccagaaaatctgaatccacataatcttttctctagggtatttaaactctgcaaatgatacattttctgtttattaaaaatggaaaaggcagaaaggtaaaaaaaagaaaaaaactctccttgacctccagtttgttggttttgttattctttctcccagttgcccttgattttgatcattcagaaacgtgagggaggagaaagaggcttcatctctctgttcacctcttcatgttccgaggaggaagcagctggttcctctgcagccggttcctctgcagccagttttctctgcagattagtttttatcattttgagagggttgtcagacataatctgatttaatctatgagaaaaaaatgacagaagccatttcagtttctgaagagacatttgaaccatccagagacttacatttgcttttaaaacacctgtcttctgtcattttgcaattgtgaccattctcctggcatttgatgtcccagccttcctgggtccttctctaactttaacctcctaattctaattatggtactaatagcattcacaccatagatgataagattttaagctgttattttttctaaaatatttacctttttaatttctgcattcatcatcacttgatctctgacacatggaaatgccacgcttcctgtttacagacaagccggctagtggcttgcttagggctgtgatggcatctcaaggtgaagagcgatgtgtcaatcattatgtctcaccaagagaagaaagcgtcagggtcagtggggtggaaaggctgctttcctccactaacaaaataatggacgggaataattttgaaaagataagtgttttctgacatcaaacgtgtgatgacttttctagcaccaacaaccaattttccaccagcaactgggggtccaccaattcaattcatttctcacattatctacctggagttgcatcagatcccacaggttaaagggctcagtctcacttcagataccagctgcaaatggtgtacccaggctacccacatgtctagcaggtgactgaaaattcgagggttcccatacccttctcccccaggttcaataactttctaagatgactgacagagctcaggaaaatactttgcttacttaataaaattttaaataatatacaaacttatttaatatatttataaataaaatatatttattaaataaatatttaatatctacttatataaaataccctggagaaaagattacatggattcagagtttcagaacaggaattcagcaacatgaaactcgggaagagaaaaacccatgacttaggtttattggcttattctaaaggatgcagctcaggaaccaagtggaaggacgcagcggacagggcgtcgtggccgcaagggtgcgcggagctgttgtcgtaacttctcgccagtggccaccttccctgcaagtggatgtgctgaccaagagtgtttataaccccgtctcgagcccctttctcacccctccccagagctgtgagtgcaatgggcagaaagctctttactccagtcactaggtgaccagcccccatgaaagctatctaggtgcccaaccctaagtcacctcatcagcgtaaactcaggcctcaggcatggtcagaaggggctctgtatgaatcacaaaagacactcctctcactcaggaaattcccagggctttggaagctctgtgccaggaaaaccaaatctattttcttattataccataatgtatttttttaatgaaagataactttcctttttcctccctcccttcccctctctcatccctttcccctcctccgccctccctcaatgcttccatgccactagcatccacacacatttagagtttcctgtgggctcgaagcagcacaaatagggcccaggtgccagagccatggaagaattgggattcccccagtgccttttagatcaatggccccttcctcccttcccttcagtgtcccctcacaactccacacactcttcttttgaagatttaatgagaaggaatctcacaaaaggagggagagaaggaagagcacacactcctctaaatgtgattgtctgggagtctaggttcattgacgcttcttttcagatccccactctgtggaaaacgtgtcaggtgctgtctacaaagattttgtctgatgccccctgttcccgagggacctaggaaccaagtgctttcagagaacaaccttttttctagaagtttgttgtttgtagggccttattccatatccattcttgggaaaccgtcatgggagcctgtgggggttgctggtggggcccccgggctcaggattgtggacctgggctccagggcacacagcatgaggttcccactgcatgttggcactcagtcttccccacccttggctgcagctatgttatgactgttactacagctcccaagtccagcaggattttgtaaaatggggaaatctctctctctttttttaagccaccattcatcacttgcctgccagggccatatgactttaatctgctgctgcacacattatctcatctcatcctgtgaggcagggtacatgtaaggaaactgcagttcagagacaatgatttacctgaacaagctcacgccgctagtctctgccagacccttggtgcaaacccaggtctgtctgatgcggatgcttttggcagctccccctaccttttctgccactacggttacctgaaaagggttccgatccagaccccaagagagggttcttggatctagtgtgagaaagaattcagggcgtgaaagtaagtttattaggaaagtagaggaataaaagaatggctactccatagagagagcagccccgaaggctgctggttgcccatttttatggttatttcttgataggctgaacaaggggtggattattcatgcctctcttttttagaccatgtaaggtaacttcctgatgttgccttggcatttctaaactgtcatggagctggtgggagtgtagccatgaggatgaccagaggtcactctcgtggccatcttggttttggtgggattcagccggcttctttactgcaacctgttttatcagcaaggtctttatggcctgtatcttgtgccaacttcctgtctcatcctgtgacttagaatgcctaaccatctgggaatgcagcccagtaggaggtttcagccctgctttacccagctcctatttaagatggagtttccctggtttaaatgcctctgacacaatggtcagcctggtttggggcaagggaaaacagcagatgggcagcagcatcagggagattgagccagaagaaccagctctggtagaacccaaagatcagtttgcttaaagtcaaataacacaggtaagccctgacccagtgactgactaaaacatcctagctttctgaaccctggcgtcctcttgtaaatggaagcagtcatatcactgacccccccgaactatggtgagtctgctatggtgagtctggacatacacaggacactggactagcataaaggctgtgatctggccggggaggggatgagcccgtggtttacgcagtggggtgtgcggggtgtggggaggcagcgtacagctctggctgtgccttggacgaggtctgggtttgaccatccaagcactcccattcccattcccagttcctgtctcccctccctctctggccatcattcagcaggcagaggagaaggagagaagtgccttggcctaccatgcccactttccagggcagttcgtggaatcttggggccctgacctgtgtggtaataatggtgaacgtgactggctctgtgataattagtgaccgacacagagaagcatcccagggtgagatgcaagactgtggcacagaaagcacaggtgttggctgtggcagggccttgtgcccagggcaagggagagaaatgaagggaagcacagggcagaggtgccaagttggagcaagctgcaggaagcatggcttggttggtgcccaggcattcctggaagacaactaggacaagacccaccattcctgggtgtgcccctcctgtcccctccccaaccacttccatctcattagagaccccagcaggcagctgtcgatcctgaatgccccagaggatacttctgcacatcacccattaacacatcctcattcctggaggtccctggctgcaaaatgatgtcactcacctggatagttcctctcctttgatgtcagattagatccttccagacttgggaccatctttctggatgctgcctgccctcctcagagaatggttggtctgggacatgccctttgcttcccttgttgtatcaatagctctaggcccacagcccctcatctgcaattcccaaatctcagcagctctgaaaatttttccccctcctttgatgttgttttcgtaactttgcgtcaaattattttggtctaaaatcaaattgaaatctatgtgaattgaggcatttatttgtctcacttagtgcaaataggcatgttttgctgcagaaattaccatgtatttgattgtgaggagccaccctggtcccaggttggggtggtgcatcacatacctttctggatcttggaaagcctgagcttcagagcatgggtggtaccagggggacagaatacaggataatggtgcaattataggagcttctgggctcatacttgtcagccctgagcctcctgtggggtggtgctggttatgtggcagctgcaggtgggatcccacccgagcatcctctgcagagcttgtgggctccaggaagggctgtttagcacctgatcctcggagggatgaccccagacgtgggtattcctctggcaaaagtcactcgataacctcaattaaggcctggccgtgagcttgtgtgagtgcttcctgagtcttcacctgcctcctttcgtcctgactctgcgtttcaccatcagggctcaggatttgcattgtcgggtgtcggaagcactatccctgtgacaaaataaaaattcaaatctgaaaacattcctttagaaattctgagaggttcccatgcagctgcacagtattgctttatggaaataaatattccacatttctccagcctggttcttagtccagtggaaataagtgaattccttttttcgaagtattcttacagtgaaaacttctaaggcaaaacagttattcatttggctagaagtaacccatctactgcaggaggagaaggctcggggacatgcagagggttggaattaactttaatgataccatctgaatgtgttcatggtgacagcagaaccttaaatgtgagttttatgctcttcacagtcattttggaaaggatttttgaattcccattttcattatattttataaatagcaattcagttataataaatgtctggaattctctttggttttgcacttacctaataatcgcttatgagaaatattagtagccaaggaagtgaagtgctgctaatgtcattgtgtgtgtcagtcttggacagatcactatttacagtggaatgtgtcagaatatccaggggtgaagactgttcgtttcccagatggccagatttggaaaccagacattcttctctataacaggtaagcatattgaacaaaggaaaaaaatgattttatgcttgcatacatgtagctatcacgtatatttgaatatttcacagagatgctggatatgttatctatgatctggggccactgctccctacacggctttccgagcggccaggcctttgagaagcagctctgtccctgtaagccagcattccctggtttggcatgcacacgtgcacacgctggctagcctgctacttaagacgcccatgaagttgtatgttctcggggcctagtgttgtttctgtgcatattggcacatggagtattcttgcataaggcagtacctttgttctctgaatggcagcagttatgaccaacagcaggaagtgctggcctatgggatgcactgctggagcccacagtttggacccacatcctcgtctatgttccctgttgtgcattggagagttctgtggcagagatggctgcaggtgagcgtgaggactgtcatctctagctgcatgcagaaacttcccctgcagggtatatacctgatttctaatagtctttctcctgaggtcaggaaataagggacacgtcggtaaaccaagacagtctgacttgcagaccagatgcctaaaaggcaattattcaggcagggtaagtttctagaagcagtaaaatttctcgttaaactgcatagtcaaataagggatcccagaacatttctgactaataaggtgtcagacctcataaataacatcatgaaaagaaagttatttcctaatcatgaccgctacctttggtcatgaagaaggaagcccaggctttcctgatgcagggaacagtgtgaccaaattgccctccatggtcactcggtgatcccgctggacaagcaatgtgttgtcctacatggctacttccagaaggctgggcgatgctatttcttgtatggacttttcattctgcctctgtctttgcatctgggggccggccacatttcacttgaatcattgggcccgtttctagaagagtatcctcttctcatttgctgccacttttctgcttctcaaattagttcagacaactgagctttgaaaaacgtctaaaataggagtaagtggtcccctgttgaatggatcaaacatgtgcctttccatgcctggactttgggtcttctgtttcttggggggctgtattagtttgccaaggctgctgtaacaaagtgctacagactcagagccttaaacaatagaagttaccctgtcacaattgtggaggccagaagtctgaatgaaggtgttgtcaggactggcttcttctgagcctctctccttggctggtagatggctgccatctcactgggttcacgtgaccttcgcttgtctctgtccgtgccctagtctcctcttcctgtaagcactgcagtcaaattagagtagggccccatgctcatgaccctcttttactttaattacctttttaaaggttctgtcttcaaatagagccacactctgaggcaccaggtattaggatttcaacatgtgagtttgagggagatgcaactcagtccataatgagggcattgtatctgactttttgagggcaaagggtcagggttgaagaagtctccgtgttaattttagctgtaatatttacagtctgtataacctttgagtctcagatttctcctttgaaaaacggggaaagtgccggcttcacagagttcggaggatcgctctgtggatgtgtgtagcacacttagtctggcacttggaaaagagcacacattccgtaaaggcagttgtgtgtttacaggcagaatgatgaggattcctgcttttagaacaagatggtaatttaacaatttagaaaaaaataatcaatgtttttcattttccaattcggattttttaagtttgaaatcaagaataaattttataacattcagcctgagcaatgtacgagacccccatctctaacaacaataacgacaacaacaacaaaattagctgggcatggtgacctgcacctgtagtgccagctactcaggaggctgaggtagaaggatcccttgagcccagcagtgagctttgattatatcactgcttgccatcctgggtgacagagtgagatgctatctccaaatatatatatatatatatatatatgtatatatatatatatacatatatatatatatacacatacatacatacacacacacatatacacacacacatacatacatatacatacacacacacacacagagagagagagagagagcaccccaccatattatatgtataacatgttggtggaatcttattaacacggttacaagaggcagtttatatggcctatgtgtaggatctttaactccaaaatgtaaaatgtttgatgattccaaatgctctggctaatgaggaatttccaagttgtaattgaatttcaaggagcaaagatagagcagtctctacctgacaaatgttaccagggtccaggcccttagaaatgatccccacctccacatgcctgacccagctgccggtgcagaaccccatcgctcacacatctgttgagctctactgaaggatcctgctcgttcctctttcccatggtggacatagaccacgtccgccaggcttcatcatggaggatgtagaggctgcttcaatttctgcttttgttttcctgagacatggaatgtaggactttctttttgaagtaactactaaatatattttgaagtaactgctaaatatatggcccgcaggtccacatgaacccaacgtggaatgaatagatttcagagaatatttaaaccactcatagacacttatctattgctacagaacaaactcctcagaactgagtgacttaaagcaaacaactcagattattcctcatgatgccgtgggctgtccaggcccatgtggctggttgtctctttcacgtggcattgggcacagccatgggctggggctccactgggccgatgtgctgaggggtacacttccacagcggggcaggtctgggctgagctggtggggacgccggccctggcaggaagctcagccattcagctggggactgtgcacccaccccttctgggccttttccacaaggctcggtgtcccccagcttggtggccagcagtgctctgacaggaaggaaggagaggctgctgggactcttaaggactgagcgtgagggtcccgcaacagcccttctccacattctgttggtcagagtaggcaggagcccagcttggagtcaagaaaggggaaatcagcacccctatctagggcaagagggaggccacagggtgctctggggacactagtgatcacagctaaggaaggaaagcggtggaactgcaagggtcaaagtaaagccccaggaaaccgaaagaccagaagaggcgtgcattgtgaaggggaaggcacgctccgccatgtgcctgctgaaattggcaatgtgggaggagaagcaggcaggaggagagagcttctaaacaagacagatcttgtcatctctgcccccccttgctggctggcttccccttcctgcctggacacactgtgcagcccccaggtatgtgctgaccagcctatccctaccctgtagcctcgtccactctccagccctactgcttgtcctttggctcattgatgcaccaatgcttccaggcagagtgtttatatgagcgtcttgcggggcgaggaatgcccaccccttaactcccagttagcaagggaaacctccctgacaccctcacccctgccaagtctagaacacatttctctgtcacgtagaaaaggattcctgtccacgatggcacttagggtctgctacctcttaggggcacctagcagggcacttgatacacatttatgcaaagacaagatggagagaggaagggagggtgcaggaattattaggaggaggagcgaagaagatggatcagtgtaatacagtgcggctaagaacagccagagaagaaagaaagcaaaggaaagaaatcatgtaggcaacctagaaaacattcaactgagactgagtccaaaaattcacacaggaaatagcaaaaatagtcttcactactaatatcctaaccctctgatattctgttattggggattttgagagataccgaatttaatgctttctgccagcttctaggcgtggaaaataatatgttctgcttagtagactcatctgttagttcattatggtctgaatggagtcgaggggcttttcctaaaggagggggttaaatgcatcctgtgtaagccccagttttgaaagcagtgttgatgtagctcagctgaagcctcccaaacatgtctgtcctatttctcactctattctcgtttgatattggagtccccacgtgagtcactattgctttttgagatataatgcattttccatgctttaaagtggctgggtcactgcaaaacagccatctctgcatcatttgtggaatgggctgctgtatttccttgatgggtgggtaacaagtcatgctgctgccagccagctggccaggtcgctctgaggagaggatgggcacgaataaaagcgtctctgtctggtgctgatcccagtcatttctttgttgctttattttgctttactttaagcctgcggctcaaggagttttctgaacaccatcttgcctaaagtgggtagcaattatggatggcttgccgtgattttcccctttggatggaattaaaggccttgctgggatcagcagtccgcttgcagaaggacagtctgaatcccgcaactctgcggatgcccctacaccgtgcagagacaggcaactgcctcaccctctctgggcttctctgtttctgagttgctcggtcagaaaattctattgcaataatggaaatcttttttgatgaagatatttaaagatgtttttgttggctctgaaagtttagaacagcatggggtttcagccatccattttcattgagtgtgcaaagctgcatttgtcatctgcagggttgtgtctttcactcattttcctgaccctgtggctgatagcagaggctggagaggggacctctatgcaggacacacttgagagcagtgtggccaagcctgtaagcactcataattgtgctcatcattgttgccaagcgtcttagggaacctgggggagccaacccaggacaaggattcctgagcatgtagcttatttgggaagggatcctgggaagcaggatgaggggagggggagtgagatagggagggcaggcaagccgttggagtgagcattgaaaagcaaatcatactgcgggcaaacagagcccattcctactggggagctctgggagactgtgtatagcacatctcagccttgttctgaggaaactgggatgcttatctgccagctgccttccatcataggctgagagctgcttccaggggtgtcagctccctggcacctctggcttgcctgccccatgtgtggatcaagtgcagagctgcagatgcttgcagtaggcagctgtcagggccttgggcacaggaggatgattgtcgacatggtctgctacagcgcagatgagccatccactcaagttctagttgctttcaccctgctttgattgtagatccaatctcagcttctggtagggagcatagcaacaatatgggtggaagggagagagtcctaggacttgagggtcctaggggtgagggtgttctcagccagagcagaggaggcaggcaggtggcaaatttcactggactaaagaagagcccaagcctgcatcccagcaaggggtgcctattctacgtgggctgcgatgtatctattatggagtcatggcagtgcacacatggaatggcatcttagggagtgaatctgtgagatgtagtgttgtcatggttaatagctcctgaaattgtggtatccctcagcctaaccgagattggcctgctggtgctcaaaggctcataatgcagtcatggccaggctcttggagggcccaagggcatcactggaaggtgatgtggttgctatagtttgaatatttgtcctttacaaatatttgaatatctgtcttctccagaatttgtgttaaaatttaacccctaatatgacagtattgagaggtgggacctttgaaggccaactgggtcatgagggctctgccctcatgaatgctttaatctattcatggattaatggatcaataggatatcatgggaatgggactgataacttgataagaagaggaagagaggcctgagccagcaccttcaggcccctccccatgcgatgcctggtaccaccttggcactacagagagtccccaccagcaagaagccctcaccagatgcagctccttgacctcggactcccagcatccatactgtaagaaatgaattcttttctttataaattacccagtttcaggcatcctgttataagcaacagaaaacaaactaagacagtagtagttccaggtgagcagaggtaattttgctgctggagatctcagagaaggagttttgaggatgtgctgttacagcttctgtattaatcagatattcacacctgagctggagggaggctgtttctaaatcatgtgttgtgggaagagggggagcagcagcttgttttaaagcagtgagtggagccagccaacctatgtttgcatcttcaaagtcatcctccgaactgtccatctcactctcccaggtctcatcatggtcgctcttgctgtttgtttttaatttgttcattcactcaaccaatatttagtgaaggctccctcagcataatcacacactgttctgggaactaaggattcagcagtgatccagccagacccaaacccaccagagaaacagagatggggaagagaggagggaggcatgggccagattgtaggtgatcccagaaaaatgaagcaggaaagggaatagtgagggctgagccagaggtcagggagagaccaggagacagactagagggctgcaaaggaacaggccctgtgatatcaagtggagagagtgttcctgacagaaggaacagccagtgcaggggccctgtcaagaaggcttgtgaaagacttcgaaatgcaaaaaaaaaaaaaaaatagtgagggaagagaaaaaaagacacctcggttcctacagaatactaggcatggtcacaggcaccttcctggtcatctgagtctgtagtggactgtgcctgtcatggtcttcaaactagttttcaactctaacttctagaaaactgatggcaaaaccaatgattctagtccacggagaagcaaatgtgttttgctggtggaccaattcccctgttgacagattcagatcagtgtgcctggttgtctttgtatgtgtctgcttttaggatgctctgcagaattggttttaacattttcctggttccttccttcattaatgacttaagtagtctttgacacacgatcactttatatttgtgcaagtgtcatgattttatcttttaaaaaatccatcaattgccctgaggcgggaacatgctatccaggtctgtcctaggagcaaattcagctgctgtggctggagagaattggtggatggggaagccagggttcagagagagggtcagagacatgatgggaggagctggggaccaagtcgtggaggccttggctttgactgtgagacaggagaggccctgatacctttgacagaatttttgtttcagttcctttttgctttgaacattttaaaaaaaaatatttattcatattctcctcttgacttgttagcaattgattcccatcaggtgattttgtccagaagttattatctgttcttttctgcttgtacactcctcccagcctgtggcagtgggcaggttttgcttttgttgtttcttctgacatctcagcaagaggaagggaggaagggcaagtgcgtgtgtgtccttaatcagcctctgatggcccagctgtttgcctcgggctaactcggagcccacctgtctgcaccagagtgagtggactgtcgctggctgactgttaatgctgtctgcctcatccggtgcttactgaaggtcccatgcactgcgttcagcctacttgcccgcagctcctggtcttcagcaccctggagccaagccccctttactgggcactcgcccagtgccagcagatgatagccaggaaattgtggctttatgccttctttctggactttatgaagtctgtttgagtgtccacaaatctcagggcgggaagctggtgctcagagaggttcagccacttgcccgaggtcactcagctgggtctgcctgactccatagtctgactcattactggccagtctctcgacacatcaggaaagagctcggtctcttgtgctttattttctaaagttaaaaagcagagagatcccctttccctccctctgagctggctccactttcgcacctgctctgggctgctctgccaggctcagccttccacttcctaaaaagagtgagtttgttttctctgaagctgctgtggggttttcttttcttttcttttcttttctttttctgaagctgctgtggggtttactgtcgcctcttgactgatttcactcagcatctgacattttcttttctttgaccaaatcccctgccagccagtgtgggccacagggcagtgccacagcagagcgtggaatgacagaacccaactgctgtctgtgcaagagtttgagcagaatttcaagcagaggacaggtgctgcggtgaatagaattttgtggggatggtgttgcattgaggtggcctgggtgaggctgtcttctggcatgtggcaacgggccagtccacggagcagctccccaaccccctgcacccccaagggccctgaagctaatcgtgcccaagagcacggcttttggagatgagcttattgatctttgtgatgtggaacacagagccagcacggttgtaagggctgtgtgataaatacatgagacaggaactcaatgggcggttcagtcttcatcatgagctgcctgagggagcagtgcgggcagccaggtgagggccagggtccgccgccaccccgccccttcccgagcctgctgtggggtccctgcgcgtgtccactgcccactagagatgcgctcttcagctgtctgcacaggaggagacttaggaagttgtgtgtgaggcatcagaaggcagctgggcctccccagcatgctaagacctcagcagtgcagggtgtggggcccgagctggatgtgccccattgcttgtatcaaaacctggagaaacagagctttccttgtgggccagggccacatggtcggtggagctgatgctgtcagtcggccgggtggtattttctggggacctactctgtgtaagacactgtgcttctaggaagacgcacattcactgccctcgaggcatgtgtaatcagtagcaaatcagtttaccgtgggtggtctcatctgacgtatttttgtgtccttcagtgaagtcatctaaaattactctgcttcacaattgaggaaatggttcctgaaattaaatggcttgttgacgcagttctgaggccttgactccacatcctcgtgcctttcccagtccttgacaggctctttgtggctgtaagacaagggcacaaagtgcatcttgcagagcagaagatgacgtatgtcagggacataacatcttagaaagatctggaagagagagagcctcatccagtgggagggtgtgggcaactgttcacggcagggtggccatacgtcttggtctgtctgggacagcccgggtttgtgcctgaggtcctggcactgctgttaatggtgccttttttcacttttaagatggggcatttcatggaaagatatgtaagttaggtcatatggcacagggcccttagcggggagggggagagatcaccttggaagggactaaatgtggcaggatcctcaatgcatatgcttggaatgaaagggagagggaaaagaacagaataatcaggtcagggactagctataatctaaggaattgccaccagtccaactggacttctctggaaatctgtccctgacgcctggccacagtcgcctactctgggctgctgtgtaccttggaggactctttgtaaacatcacacgatgctgcggatgtgagtttgatactcttgtttttccccactgtccagtgagctccttgggagcaaccaagttctattcacattttgtaatccccccaagttagtgtgacaagtagcacatggcaagcagcacatcgcagtgggtgagggactagtggggccactaccctgttccaggagggagttgctggaggccagaacctgggcagaaccttggaactcaggctgtctggatcaagagagccatcttctagcacccttagattaaaaataagtaagttctgattgtgtggggcagggatgtagggtatgggtcctatcccgagaagcaaattagtctagaaatgattctcctttctcctccactacccataccaatctatcttgaaggattatgcatttgaaattactctagtcatcttttcacattatttgtggtctttttttaatataaattttacatccttagctaatcacatttttgtgttgtttcctttatggatcctttatggctttggggtcccagaccaggagactatccatttattctactaaatagtttgttttttattgtgtatggttttttttccctaaaatgtttgtgtatgctatgaggtaagggtctaactttacttttctttaagggatagaaaataattctaacagcacttattgagcaatacatctttctccccatggcattgaagtgggatggttatattcatttatgcatgtgccaataccatactgagagctaagcagggtgaataaaaagagacatatgtcttgaatatcttgctgcgattttaaaacactcatgataaaggcaaaacccttataagctctcaaagcaaaaaaaaaaaaaaaatcacaatagcaagaaacagtagcctagtagaggactactttcaaatattgaagggcaattatttttaaaataaaatattttgttgaactgaactttctgggcaaaaatgaaagcagttttaaatatgtaaagactcaagtctgaaagaattactcagaattgtattccagcaaaatgagaagaaaccaagaaagaggcaaacctggaatataatcagcactcgtgagtgatggaatcactaaaaggcatagttcagtctaattatttgatgatgttgttaaatggtttttgttggcaggggactaagaagtagaagaagtaacagcagacgtttggtgtcggccttctttggttcatgcatgataaagataaacctcgttaaatgcacaaaatgaaaaaaagtacaagtaaatatgtatgttaaatatttgaatagctatcagagtaacagaaatagtgtcataacttccagaccactagagataaaataagggaccaaaacctgaagtcgatacctctaatgcaagaacagaaaactgagaaacagtgtaagtatgaggtctctcatggatccctggcatgggtatgaacattattttaaactgaagacatttgagattaaacagatagggaaagaagctttttcagagcttacttatcagactacagcaaaaacttctgggagcgagcctggcataaatctcctttctaggggagtctttactggctggaaagaagatggaaaagaccagttgcacctgcataaacaaaactttcccacagaccttcttatctcccatttgctcccctagaaaccgatttgttcttttcatagaagcccttcctctcccctctctctccgctgtgcagtatataatctcacctttagctgtttgaagagttgcatttttctttgtgcccctgtgcccatgtaggcataaaagtcagttttctcttgctcatctgtcttttgtcagtttaattcctaagctcccccccgccaaaagaatctataagggtagaggaagagcatttcttctctaacatgagaaaatctggccaaaaaaaaaaaaaaaaaacagcctacaaaaaaccagaaaacaaacctactagcagaaacgagttaaaacaatcactaatcacaaaaattcaaatggatttaaatcccataacagttctcaaaccaaaacagactcctagatgggtttcaaaaaatcaaaatccaactatattgtatatacagaaggtagattttaatcaaataatccaaaaggttgaaatgaaaaggatcgaaaaaccatgtctgccaaatgccataagaagaaacagatttagcattgttcttatttcacaaatatagatgaaagacaaaatacgtaaaaagggacaaaatgaatattttatattgattaaaggaaaatttattgagaaaacaaagtgctcatgaataattatgttgcagtgtgactgcaaaaaatacagtcaatgctgatgaaagtcaaaggagaaattaacaaaaaccaggatctcaagaaagggtaagtatgcttacatggaatgaaataaaacagtggttaaaactaacccagaagatatatagaaagatttgtatctaacaaatatttcccaaaagtagtaatattcacaaaaaataaactaagactggaagaaaattcataagcagataaatattactcagaagaaaactggcaaacaaagctgactgttgaaaagtcaggtgaatccacctcaaagtcagagataaggcaaagatgagaaatgttagggactgaatgattgtgtcccctcgagaattagtatgttgaaatcctaacccccaaggtgatggaattagaaggtggggcctctaggaggggattgggtcataaaggtggagtttcatgaatgggattagtgtccttataagaagagacacaagggctttcttcctgtctctgcttatttggccatctgaggacacaaggaggagatgtgtatctgcaaaccaggacagttgccctccccagacatcagatccgtgggtgctttgatcttggacttacaggctccagaactgtggaagataaatgccagaactgactaagacaacagctatcactgctttcaactgccgggtggatgccctagccggagccctatgacagcaagttaaagaaagatatctaaatattacgagaaagaaaaaacactatcattacttccagttggttagtcacctaaaggcagacgcagctgacaaactttgaactaataaaagatttaagaaagaagacaatagctgagctaggtgtgagtgaagaacagtgaagtgaaatggaaagaacagacctcatttacactcatgatgataaccataaaataccaaagaatcaacctggtgcccatgcaccaaacccttctgaggaaaacgataaaaattcaccaaagcacctgaaagagtaaaagagtcaggaagcagcatgtggggtctgccagctctccttcccctgcagctgggccatgtgttggaagcctggagtagcagcagggttactgcctggggtcccagagtcaaggacttagaactgctgtgcccgggctgcctagtagactctagagacgctccgctgcagtcttctggggtcaagaggggacaatcggaaagagctttaaaaactctcaggctgctcagggagttcttagatagtgctttgggctccatgtgcaggatctagatcctgcttgcctggtttgctcttctgattcgatgttccaatatctgctctggctaagaagctgccgagtgattgttaacaatggaaactgcatctttacctcctcagggtctgatacagcaggtgtggagtacagctcaggaatcggtcatacatggtccccctggatcacttgtgaaagactctgtcctgctgggcatgaatgccagcttgcattcctttaattagatggaaactaggaggtatttggtggctggaagtcatgaatttcagcccatacacttccttcaattacatgcttgtctccctcctgctgtccagagaaaaccaactgaatgatgaatagtgctctcaccattggtagctgatagcaaaaaaaaaaaatgatccagaacttcattttgacaaatgaatgcttctccctgatacctagtttgtgcttctcattttcccagggatgcattaatgctagagaactttagtgaatcactacagaattacttatgcattttgtagttaataggcaaaatatgttgtgcctgtaacatagctcctttgatgttcttagtaagcagaacgtagtatggattctactttattgacttccagatggtgcctctaaaggttatgactatgagctagttaaatgttttgtccctaccagtgggttcatggcttcataaagacctgtggtaggtagcatctgagtttgtagtttgcatttatttctgacttttaagtctacattgacacaatctctttatcttggctttgttgaactctgcctcatttattatgaaagctgacttcaggttgagggcaaggcaaagaaagaagccttcgtatttcaaaagaacaagatgggtagccacgacacagtcaaattggttaatttctgttcctcgctccctaaactgctaaatttcattttatatatcttccttcagtccatctacttaatatattttatgtggttagacggactgcatttttcactcatcctgttttccatgggtttttctcatcatcattttaatagtgacataattcatagagatgatactttctagttcaccattgttggatttagtatgtttctaacagattaataattataggtcataagaaatggaaaaaaaattatagggaggtacattttcatattcctcctaatattccccagcagtaacaccttaaataactctagtgtaatatcaaagccaagaaattaacattggtatattccacaaagtttattcagatttcaccagttttacattcatgcatttttgtgtagtatatataattctaagcaaattcatcacatgtattgattcatgtagccaccaacaaattaagataaagaactgttccacgactgtaaagatctcttgcactatacccttatagccacatcccgcttgtccctaactactggcaaacactaatccatctctgtcattgtggcatttcaagaatattttatgtgtagactaatatagtttgtaaccttttgagggtggctgagtagtggtctgtggtatggatgtgccacaatttgtgtaactattaatccattaacagatatttgagatgttttcagtttttcgctattgcaatcatagcttctataacatccatgtccatgtttgtttgtttttgaagatgtttccattcgtctggtataaattacataagcacgcaattgttaggttgtataataagcagatgcttcattttataagaaactgccatactcttttccagagtggccgttcccacctaagtgatcaagtaattccgcatcctccccagaatttggtgttatcactattttttttattttagccacgctagtaggtgtgtagtgataacccattgtgtttttaatttacattctcctggtggctaatgctgttgaacatcttactatgtggtggttcgtcacctgtatatcctcttcattgaaatatatgttcatgtctgtttgcccgttttctagttagattgtgtggggttttgtttgttttatttttactcttgagatttaagagttctttatgctagatatgccttttgtcagatatgtgttttgaaaatatagtttgtctttctgtagtttatctcttcatcttctttacagggtctttcacagagtaaacatgttctttttaaaaattacagtgaagttttttatcaaattttactttgatggattgtgtttttgatgtcaagtcttggaactcatagcctagagtgctgaagatttcctcctatgttttgttctaaaagtttcacatttttaagtcttacatttaagtctgttctttaagttgatgtcaatttttggtatgatatctgagatttacatcaaagtttatccttttgcctgtggattttcagttattccaggtccactcattgagaagactatattcctcttctgaattgctttgaaaaaatcagttgggtatatttgtgtgggtctactattgggttctcaattctgttttattaatctagatatctcttcctctattatagtcttttgctttcatcgtatagtaacgcttaacattgagtagagtgtttcttcccattttattgttccttttcaaaattgttttagctattttagtttctttgtttatataaatttcagactgactttgtgtatccatatgtacaaaactcttgctgggtttttaatgggaattgtgttaagcctacaggttctcgtagggacaattatgttgaatcttccaatccatgatcatggtatgtccctcttatttcaatcttctatgatttttccatcagtattttgtagttttcaacatgtgagatttatgcttgttttgttaaatttatatttgtttcatttttgaccagttgtaaatgatactgcattttcagtaaccacatgtttactgttagtatagcaattattttatgttgatcttgtatttctgaccttgctgaacttactcattaggtttagcagttttttttttaattgtttttgttttgagattcctttggattttccacatagaccatcatgtcacctgaaaatagtaactttttaaatttctttctgatttctaggcctcttacttcctttactttcctggctaggatttctagtattatgctgaattagaatgttaaaagtgaacaactttatcttgtttctgatcttatggcgaaagcatccagtctttcactattaagtatgatgctagctgtaggttttttgtggaattgcttttatcaggatgaggaagtttccctctattccagttttctgagactttttaatatggatgagtgttgagtgttattacttgctttttctgcatcaattgatataatcaggtgatttttcttccttggcatcttaatatggtagattacattgatcagttttcaattattgaactagctttacactcatggaacaaactctacttggtcatgtgtgtaattccttatatatactgctaagttgtattgccaatattttattaagggtggtttatgtatatttatgagagaatgtggtctgtagtttttgttttgcattttataaattttttctactgtctttgtctagttttggttatgaggttaataaaagcctctgtgttttatccttttttatttactgggagacagttatagaattgatattaattcttccttaaatgtttgttaaaattccccagcgaagccattcaggatgtggagatacctttttaaaaaacatttaaaattatgaactcaatgtgtttaattgttttagggatcttcagcttatttatagcctattggttgagttgtggtagtttgtacttttcaaggaattggtgcatttcatttaagttgctaaatgtatgtgttaatttctatgtaaagagttgttcatagctttcctcatcattcttttgatgtctacaatgtctgtgtagtgacacatagaatacattcgtggtattagtttgtcaattttattgatattttcaaagaagattttcatttcattgatttttttttcttttttttctcttctccgtgtcagtgattttatacttttatatttattatttacttccttctacttgtggggcttgtcttctcttttctagtttcttaccgagtgagcatagatatagacttgaatctttttctctttcttaaaataagcagtactataaatttattcttagcactaccagcatgtcatacatattgatacattgcatttttattcagttcagtgtatttttttccatttccttgagactttctctttgactcatggattatttagcaatttggcattcagtttccaagtgtttggagattttcttgtcatcttaatgctattcatgtctagtttgattccattgtgggcaaatatcacactttgtgtggtttcacttcttttaaatgtattgaggtttttcttaggctcaggatatggtctatcttggtatatgctccatgagtacttgttggtagacagtttcctaaatgccaattaagtcctgttgtttgatggtgtaagttcttttatatccttgctgattttctgtctagttgccctgtcatgaattattgagagaggagtgttgaaacctccaaatatagttgtgaacttgtctatatcttttgaaaatttccatcagttctggggtcatgtattttgaagctttcttgtttgagaaaggatttatgattgctgcatcttcttggtagactgagcttttatcattatgtaaatttatatctatctttcataattttcttttctctaagatctgctttatctgataataatatagttactcttgtgttttttgagtaatgtttgcagggtatgtgtgtctgtgatatatatatattatatatatatattcttcgttttttctttcctgcctatgatgtacttaacttttttttagaatttcttttttagaatttttagaatcttttttatttatagtgtttttgagtatgtctctttgtacacctatttcatggttgctcttgatattacattttatgtatgtaacttattacgttactgactactgatataaacatcttactggttcaagtaaagtagataaattttctcttccttcttttattgtttttttctctctttcaagaacttccttgagccatacttcttgggtgattctgctggtcactatttctcttagttttttcttcatctgaaaatgtcttgacatttcttcattattcctgaaagatattttaactggatttagaattttgagtgtacagtaagttatttcagcattcggaaactgtcataccacctcctgctggtctccgtggttactgttgaaaattctgctgtcatttaaatttgttgttgttgtttagttttgtttttcccccttacggatcatttttctctggctgctttcaagattttctctttgtgtttaatttttagatgtttgattatgatgattcttggcattaatttttttgtatttatctggtttgggttttactcagcttcttgaatctgtagatgtatatcttttgctaaatttggaaaatttttaataatttcttcaaacatttttcattctcattttctttctcttctttttctgagactctcatgacacaaatatcagattttgttatggcttcacacccctgcaggctgtgtcgattttttttcttttttttggtctattttacctttgttgctccgattgcataatttctattctgtcttcaagtcagattctttcctttgctatctccactctactattgagcccagcctacatgttggtaatcccagttactgtatttttcagttctaaattttcatttagtttttctttatatcttctatttatttgttgagactttctattttttcactggtttcaaacatgttcttaattgcctaccaaagcattattatgattgaggttttaaaatccagagaattccaactttctgaattatctgttttggcatctgctaattttctcttctcattaaagttgaggtttttttcttgattttggtattacaggtgatttttaaaattatatcctggacattttgggtattattgtttgagactccaagtcttatttcagtgttccttttcactagacctcctctgacactgtgctagcagaggagggaggacaccacccctgctgtcgtgtggttcaggccccccactcagcctctgttgacacctgggagggatggggaccttggtactgctaggtgggagtggaagtccaggctccccaagtgttctccactgaaacagcaggaggcggctgggtcaagatgaggtcactgcttggccttctctgacatcacctcttgcaagtatggggaggagtgtctcccttttgcctggggatgtttgaatctagagtgctccctgggcctttgctgatgaggctgctggtggagtccagctttttcctttggtgtttccctggggcagcgctcttggctagacacggtccagctgtcaggctgcttctctcctgaccatttggcgagagagggcaagctttcctcaggacttctttggtctgtacctgttggggtttttttggtgcattcttctccagaacccagtttggaataggtaagataaatagtaaacctagggatgtcagcaccatgccgttctgcctgtcacaaaggtgtgatcccttctgccttcttctctgaactgttgacagccttcttatgtttatttatggattatgtgaagacttcttagtcatatttagcaagagtaataatgattactcaggtcagcctgtcataacaaaataccatagactgggaggctttaaataatagaaatttattttcacacaattctgggagctgagaagttcaagatcaagggtctggatttggttccctgaagagaactctctctggtttatggcttccttctcattgtgtccttacatggcagagagaaagagagagggagtgggagagggagagagaggggcacgtgctggcttccctcttcctataaggccaccagtcctatcagaatagggctctacccctgtgacctgatttaaccctggtcagctcttgcttatcgtttttagccgtattacctccttatcgtttttcttgtatttatgctgtcatagcaagtggcatttttctgaaagcatatgcttagtttatttagactttatatttattcagattaaggttggtcaatttcttcactcaatctgaaggaaaagctctttaaaaaatcagcctgatcatttttcaatgaacctctggtgtggactttgggcatccgattgtgtaggaggctctcaaggctggctgtttgcccagtcagcattgtcactgggggacgagctggcagggtgcaatgttgttcccttcacctttgtgtctccaagtgaccctttcctcatagggatgaatttccacccatgatgaatagtccttgtgtgcatagtaatcccagtgtcagaacatcttctccttccactgctggggataattagcttcctttttcttttgtttcatacatctggagccagaaaaggcataacaggtcacatagtttagaaatggacatactttttaaaaaatttcatgagctccttcacgtccatttatctaggctacgtaaaactgttagaaggaatgcccaggctacaagctataagcaggcaggagggtggggcccgtggagcccagctctctcccacacgaggccctgggagttcagtcaaccatcctgggtcgcaaaagtcattacccaagaaggcgggagtaaaactcgtgcttctgccctcttgccctgtacgaggtgggttggaactgagaaggccaggaccttcaaaatgctgcattctccctgagaagttggaattgaaaaaaataaaatctaccatccagtgcaagacgatgaaaaagaagcatgactgttttaggctgtgctcagtcagggctcagagtcttccatgggaattcacaacagatgagggaaggggtgcctcctggtgctggtttgatatgtccagcagaacccaggaaattccagcaccaattgtagtggcatgcaaagtggtctgatctgtgaggctctgggcacctggcagaatggagtgcagggcacctggagagaagtccccctccggccaggtccacaggatctccatagacacggtagcaacacaggttggggattcattccagtatgtccagtcagcaaggttcatgtgccatgaacatgctctgcagatggtgattggggtttgagacatgggttttctgcagcctgacaaatattccatgctctgataagtgtccaggtgtgaggccaggtgtgcaggcaatgctgtgagagggcagccaagggctctgcccctttctctcctgcgtcctcctccctccacatccatcctgtcccacccctgtgactacatgtgggtttttttgtgtgttttttttttttctgagactgagtctggctctgtctcccaggctagagtacagtggcgggatctcggctcactgcaaccttcacttcccaagttcaaacaattcttgtgccttaacctcctgagtagctgggattacaggtgcccaccaccattcccggctaatttttgtgtttttagtagagatggggtttcaccatgttagccaggctggtcttgaactcctgacctcaggtgatccgccctcctcggcctcccaaactcctgggattcaggcgtgagccaccacacctggcctgcatctatatttttaagctcttgtgccatttagccttcattaatttttttaagaaaacattacagatgaaaactgtatgaggaatgaaacactataagaaataatatggaaactcaatttttaaaaatcagctaaaaatgaacttcaaattaaaacacatacagaaacatctcactttgagcaagcattcacaaacatagcaaaaggcaggtttggactcttaaacacttaagacaatagaaactgacaaatgatttgaaaataattacactcaagtaagaattaaaaacacaaatgagagaaaccctttaaaaagcaactttgaaaagaatcaagtaaaattaagagagatgagaaataatatagccatcaaaattaaagacagtggaggcatagaatgtcagatgagacacagttgaaggagcagaggcagtttcctgcgtgaatcatagaaagctaaatagatggaaagtaggaaagaatgatttacggtcgtgcaataatatccaacacttctgtagtgcttctgtgcaccaggtcctgtttcaaatgctttacatatattaacaaccttctgaggaaagcgctgtgattattttcagatatgacagctggagcacactgtggccaaggtcatgcagaaagcaggtctggaagcctgcaccccccaggagaggctgtgcctgacaaggagggctgcttcctctcatgccggggataggtgctcccatacacactggctagaatagtagaaggcaataataaattgcatgtgggagaaatattaaaagattattttcagaaaacaggtaaagttatggctcacatacagatataaaaatgagcatgttgaagaatctatttgactcatatcacatgaggaaacaaagcagatgttctcagttcaatgggaaagtcaaactagtacaaatttatatagagtaaaggaatttcgagatgaattctaaatggacacagaacttgtttatctaaaggggcaggaagtcaaggcactaccaattaaatcactactgggcgactgagaacttccgcatctatcagctgcttacggtccgcgcacagtggcaaagcagctcagacagtgaacagggcgagacttgctaagtgagatctatgtgctgtaggggacacatcgttttccattgaaatacaatgatttttttcaacagaagccatgtcccaaaagaacagctgaggatgtaataatattgatgaaaaacatacatcctcagcttcaggagataaaagtctgaggaaagatatgtgataggaaatgagcccaagacatattgtgcaaaaaagctgcaggaatgtccaaagccaaaaaaagatcctagaagcgatgagagaaaaatagatagcttgctaacaaagagatggcaattagactgactgcagaccttttaaaggcaacagtagaagccagaaaaataaacgaaaataacgtcttttaagtatgaaaggaaataattgtcaacctagagttttatcctgagctaaaccattctttacctgatgggcaaaatcaagacattctcgggaaaacatatactaaaggagtttaccgtgcaggggctgtgctactattttaaaaaactaccagaagacgtttaggaactaggcatgagaagcagtgagcgaagcaattggcaaagattcaggtacatgtaaacagatttggttatataaaataataatgatgaatttgagagtattaaaaacaaagtgggacagggcgcaggggctcatgcctgtagtcccagcactttgggaggccaaggcaagtagatcacctgaggtcaggagttcgagaccagcctggccaacatggtgaaaccccatctctactaaaaatacaaaaattagccgggcgtggtggcatgtgcctgtagtcccagctacttgggagggtgaggcaggaggatcgcttgaacccaggaggcagaggttgcagtgagctgagatagcaccactgcactccaacctggaacctgagtgacagagcaagactccatctcaaaaaaaaaaaaaaaaagatggaattaaaatactggaaaatatagcatgaaatagtaacttggacagtgcttggaggtaaaaccctcaggtgtacttatatgactctggaaggccatggagacgtcagctttaagtgaaatatacaaggttaaagtgtgagaataaccaccagaccagacacattaagaatactatatttaacttccaaacaagtaggggtcgaatggggaagggatgaagaaaacaggagaaggccggcgcggtggctgacgcctgtaatcccggcactgtgggaggccggggcgggcggatcacgaggtcaggagatcgagaccatcccggctaacacggtgaaaccccgtctctactaaaaatacaaaaaaattagccgggcgtggtggcgggcgcctgtagtcccagctacttgggaggctgaggcaggagaatggcgtgaacccgggaggcggagcttgcagtgagccgagatcccgccactgcactccagcctgggcgacagagcgagactccgtctcaaaaaaaaaaaaaaagaaaaaaaaaagaaaacaggagaaacctaaatgcaatccaaggaggaagaagtcaaaagcataacattagatggtagaaatgaaaacaaatattacagtagacaagataaaagtaaatgggatggccagctggttaaaacacagatctccccaatatatctctatgcatttaaatcgaacgatagactgtttagatgaaactaaaccatatatacgtaaaggatgaacgcaaaaaaggaaaaacaaaaacaggaacaaaaataaaatgtgagtggctatgtttacaacaccccccccccacacaaacacagtaagaaaaacaagtataattaaggttaaataaggtcaggtgatagtgattttttaaaactaaggatatataacaaatcttacatgtatatatctaataaaattgctttgaagaaaaattggtagaatttaaagtttactggataagtccacaattacagtagaagattttaatgtacctcttttagtaattgatagtgtaacaaggggaaaaaaaatgtaagtatgtaggagttttgaacaacacagttaacaagtcttacccaatatatagatatagatacagatatagaaaaaatgcatcctcattccactagaaaataaatatatggaaaactggatatctaaatgtgaataaaaacatttagcatgtgtggtgtgagtttgtgtgtgtacgtgtgtgtgcacacatgcactcacatatgtataggaatgcaggcagacatacatagcctttaaatgcttatgttagaaaagatacttgtctaagcatctttaccatatgatccaacaattgtcctcctcagtatttacccaaaggagctgaaaacctgtgttcacacagaaacctacacacatatgttgatagcagcatagacatcttttttaggaaaccctaaaggcttttaatatcttttttgggaaaatgtgtgagataattaccaaactcaagaagttataaaatataacattaactccaatgaaaaaaagaaggaggaataaagataaacctagaaatgtattaaataagaaaactaaaatagagatcaacgaaggacaaattggttttaaaaaagaactaataaaatcaacatacctcaggaaataattaccaagaaaacaaagaaggcacaaacaaacatttactggatataaaaggggttttcaactacagaaaaatacttaaaaatagaatattgtgacacaattttatgccaaaattttggaaacttagatagatttaatattttctagaaaaatagaccaaaaagggaatagactagcaaaaaaacagactttgttttttaaagcagtttgaggttcatagcataactgtgtggaaggtacaagttcccatgtcccctcccaacccccacccaagcacagcctcccccatcatcaacatcccccaccagggccgtacaattgaaatagatgaactgatgcagacacatcattaccacccagagtccatagtttacatcagggttctctcttggtggcgtatgggttctgtgggtttgcacagatgtataatgacctgtatcgaccattatagtatcattcagaatagcttcactgccctaaaaatcctcggtgctccacctattcatcccgccctctctctgcaatccatggcagccattgacctgttatgttttgttttgttttgttttgttttgttttgttttgtttgagatggtgtatcgctctgtcgcccaggctggagtgcagtggtgcgatctcggctcactgcaacctccacgtcccgggttcaagcgattctcccacctcagcctcctgagtggctgggactacaggtgcacgccaccacgcctggctaatttttgtatttttagtagagacagggtttcgtcatgttggccaagctggtctcaaactcctgacctcgggtgatccacctgccttagcctcccaaagtgctgggattacaggcgtgagccactgcgcccggcctgatctgttttgctgtctccattgctttacttttcctagaatatcatataattggaatcttacagtctgtaatcttttcagattgacttatttcatttggtaatatgcatttaaggttcctccatgtttttttcatggcttgatagcccatttctttttagcactgaataataatccattgtttggatatagcacagttagtttatccatttcacctactgaaggttgcttccaagttttagcaattatgaataaagctgctatcaacatatgtatgtaggtttctgtgtgaacacacgttttctgctcctttggataaatacaagggaaggcaattgttggatcacatggaaagagtatgcttcgttttgtaggaaactgccaaactgccttccaaagtgactgcaccatttctcatgcccaccagcagtgtatgagagttcctgttgctctgcatccttgccagcatttggtgttgtcagtgttctggattttggtcattctaatagatgcgtagtggtgtctcagtttttttttttttaatttgtattaaatatgacaatgtggaacatatttctatgtgcttctttgccatctctatattgtctttgctcaggtgtctgttaaggtctttggcccattattttaattggattgtttgttttcttattgctgagttttaagagttctttgtatattttggattacagttcattattagatgtgtcttttgcaaatattttctcccaatctggaggtcatcttttcattcttttgatcagtatatttttaaaaaagaaattcaaaaaggtaggtttacaggcaagttccacccagcataaaatatcattatgaacataaatgtataagccttttttattattatactttaagttatagggtacctgtgcacaatgtgcaggtttgttacattaggtgtacatgtgccatgttggcttgctgcatccattaactggtcatttacattagatatttctcctaatgctatcccacccccagccccccaccccccgagaggccccggtgtgtgatgttccctgccctgtgtccatgtgttctcattgttcagttcccgtctatgaatgagaacatgtggtgtttggttttctgtccttgtgatagtttgctgagaatgatggtttccagcttcatccatgtgcctgcaaaggacatgaactcatccttttttatggctgcatagtactcatggtgtatgtgtgccacattttcttaatccaatctgtcattgatggacatttgggttggttccaagtctttgctattgtgaatagtgccgcaataaatatacgtgtgcatatgtctttatagtagcatgatgtataatcctttgggtatatacccagtaatgggattgctgggtcaaatggtatttctagttctagatccttgagaaatcttccactgtcttccacaatggttgaactagtttacactcccaccagcagtgtaaaagcattcctatttctccacatcctctctagcatctgttgtttcctgactttttaatgattgccattctaactggtgtgagagagatggtatctcattgtggtttggatttgcatttctctgatggccagtgatgatgagcattttttcatgtgtctgttgtctgcataaatgtcttcttttgagaagtgtctcttcatatcctttgcccactttttgatggggttgtttttttcttgtaaatttgtttaagttatttgtagattctggatattagccctttgtcagatgggtagattgcaaaaattttctcccattctctaggttgcctgttcactctgatgatggtttcttttgctgtgcagaagctctttagtttaattaaatcctatttgtatattttggcttttgttgccattgcttttggtgttttagtcatgaagtctttgcccatgcctatgtcctgaatggtattgcctaggttttcttctagggtttttatggttttatgtcttaggtttaagtctttaatccatcttgagttaatttttgtataaggtgtaaggaagggatccagtttcagctttatacatatggctagccagttttcccagtactatttattaaacaggaaatcctttccccatttcttgtttttgtcaggtttgtcaaagatcagatggttgtagatgtgtggtgttatttctgaggcctctgttctcttccattggtctatatctctgttttggtaccagtaccatgctgttttggttactgtagccttgtagtgtagtttgaagtcaggtaatgtgatgcctccagctttgttgtttttgcttaggattgtcttggctatgtgggctcttttttgtttccatatgaactttaaagtagttttttccaattctgtgaagaaagtcattggtagcttgatggggatggcattgaatctgtaaattaccttgagcagtatggccattttcacgatattgattcttcctatccatgagcatggaatgctcttccatttgtttgtgtcctcttttatttcattgagcagtggtttgtagttctccttgaagaggtccttcacatcccttgtaaattggattcctaggtattttattctctttgtagcaattgtgaatgggagttcattcatgatttggttctctgtttgtctgttattggtgtataggaatgcttgtgatttttgcacattgattttgtatcctgagactttgctgaagttgcttaatcagcttgagatttttggctgagacaatggggttttctaaatatacaatcatgtcgtctgcaaacagggacaatttgacttcctcttttcctatttgaataccctttatttctttctcttgcctgattgccttggccagaacttccaacactatgttgaataggagtggtgaagagggcatccttgtcttgtgccagttttcaaagggaatgattccagttttggactattcagtatgatattggctgggggtttgccataaatagctcttattattttgagatacgttccatcaatacctagtttattgagagtttttagcatgaagggctgttgaattttgtcgaaggccttttctgcatctattgagataatcatgtggtttttgtcattggttctgtttatgtgatggattacatgtattgatttgcatatattgaaccagccttgcatcccagggatgaagccaacttgatcatgatggataagctttttgatgtgctgttggattctgtttgccagtattttattgaggatttttgcatcaatgctcctcagggatattggtctaaaattctcttttttggttgtgtctctgcccagctttggtatcaggatgatgctggcctaataaaatgagttagggaggattccctctttttctattgattggaatagtttccgaagaaatggtaccggctcctctgtacctctggcagaattcggctgtgaatttgtctggtcctggacttttttgggttggtaggctattaattattgcctcaatttcagaacctgttgttagtctattcagagattcaacttcttcctagtttagtcttgggagggtgcatgagtccaggaatttatccatttcttctagattttctagtttatttgtatagaggtgtttatagtattctctgacagtattttgtatttctgtgagatcggtggtgatatcccctttatcattttttattgcgtctatttgatttttctctgttttcttctttattagtcttgctagcggtctgtctattttgttgatcttttcaaaaaacccgttcctggattcattgattttttgaaggtttttttgtgtctctatctccttcagttctgctctgatcttaattatttctttccttcagctagcttttgaatttatttgcttttgcttctctagttcttttcattgcgatgttaggatgtcaattttagatctttcttgctttctcttgtgggcatttagtgctataaatttccctctacacactactttgaatgtgtcccagagattctggtacgttgtgtgtctttgttctcattggtttcaaagaatatctttatttctgccttcatttcgttatttacccagtagtcattcaggagcccgttgttcagtttccatgtagttgtgcagttttgagtgagtttcttaatcttgagttctaatttgattgcactgtggtctgagagacagtttcttgtgatttctgttcttttacatttgccgaggagtgttttacttccaattatttggtcaattttagaataagtgcaatgtggtgctgagaagaatgcatatcctgttgatttggggtggagagttctgtagatatctattaggttcacttggggcagagctaagttcaaatcctgggtattcttgttaaccttctgtctcgttgatctaatattgacagtgggctgttaaagtctcccattattattttgtgggagtctaagtctctttgtaggtctctaaggacttgctttatgaatcttggtgctcctgtattaggtgcatatatatttaggatagttagctcttcttgttgaattaatccctttaccattatataatggccttctttgtctctttttatctttgttggttgaaagtctgttttatcagagactaggattgcaacccctgctttttttttgcattccatttgcttggtagatcttcctccatcccttcattttgagcctatgtgtgtctctgcatgtgagatgggtctcctgaatacagcacactgatgggtcttgactctttatccaatattctagtctgtgtcttttaattggggcatttagcccatttgcatttaaggttaatattgttatgtgtgaacttgatcctgtcattatgatgctagctgattattttgcctgttaattgatgtggtttcttcatagcatcgatggtctttaccatttggcgtgtttttgcagaggctggtaccagttgttcctttccatgttaagtgcttccttcaggagctcttgtaaggcaggcctggtggtgacaaaatctctcagcatttgcttgtctgtaaaggattttatttctccttcacttatgaagcttggtttggctggatatgaaattctgggttgaaaattctttaagaatgttgaatattggcccccactctcttctggcttgtagggtttctgccgagagatccactgttagtctgatgggcttccctttgtgggtaacccgacttttccctctggctgctgttaacattttttcccttcatttcaaccttggtgaatctgaaaattatgtgtcttggggttgctctttttgaagagtagctttgtggtgttctctgtatttcctgaatttgaatgttggcctgccttgctaggttggggaagttctcctggataatatcctgaagggtgttttccaacttggttccattctgctcatcactttcaggtacaccaatcaaacatagatttggtcttgtcacatagtcccatatttcttggaggctttgtttgtttcgttttactgttttttctctaatcttgtcttctcacttcatttcattaatttgatcttcaaacactgatatcctttcttccacttgatcgaatcggctattgaagcttgtgcatgtgtcatgaagttctcatgctgtggttttcagctccatcaggtcatttcaggtcttctctatactattcattctagttagccattcatctaaccttttttcaaggttcttagcttccttgcaatgggttcgaacatgctcctttagcttggagaagtttcttattgccgaccttctgaaacctacttctgtcaactcgtcaaagtcattctccatccagttttgttccattgctggcaaggagctgcgatcctttggagaagaaggggtgctctggtttttggaattttcagtttttctgctcttctcctcatctttgtggttttatctacctttggtctttgatgttggtgacctacagatggggttttggtgtggatgtcccttttgttgatgttgatgctattcctttctgtttgttagttttccttttaacagtaaggcccctcagctgcaggtctgttggagtttgctggaggtccactccagaccctgtttgcctgagtatcaccagcagaggctgcagaacagcaaacattgctgcctgatccttcttcttgaagctttgtcccagaggagcacccacctgtatgaggtgtctgttggcccctactgggagatgtctcccagtcaggctacacgggggtcagggacccacttgaggaggcagtctatccattctcagagcttgaacgccgtgctgggagaaccagtgctctcttcagaggtgtcagacagagatgtttaagtctgcagaagttgtctgctgccttttgttcagctatgccctgcccacagaagtggagtctatagaggcagtaggccttgctgagctgtggtgggctccactcagttcgagcttcctggccgctttgtttacctactcaagcctcagcagtggcggacacccctccccaccaccaggctgtagcctcacagatcgatcacagactgctgtgctagcagtgagcaaggctccgtgggtgtgggtcccactgggccaggcacaggagggaatctcctggtctgctgatcgctaagaccgttgaaaagtgcagtatttgggcgggagtgtactgtttttccaggtacagtctgtcacagcttcccttggctaggaaagggaaatcccccaaccccttgcacttcctgggtgaggcgacgccccaccctgctttggcttgccctccgtgggttgcacccactgtccaaccagtcccaatgagatgaaccaggtacctcagttggagaaatcacccatcttctgcgttgatctcgtttggagctgcagaccagagctgttcttattcggccatcttggaagcaactcctatgtataagtcttaactaaaatatcagcataacaaagtctagcaataagttaaaaataaatcctaacaagtttaggcttctattaggaatgcacagtttgtttaactttcaaaaaagtccattaatataattcattctattaaaagattgaggcagaaaaaaataaatgatcattctggtagctggagaaaaatcagttgatgttatttaaaacccatttgtaattggaagaagtttcacctaacctgacataggggtctcacttaatgctgaaacattagaagtttctaaacgtagaataaaataagaatatcagtgtcatcactttttaaaaatatcttagtgactatatgaatttcagtagtaatacaagtaaaataataaaatgtttatgaataaggaataaacctgttatcatctttataggccatatctgttttttacatagaaaatccctagagactgtctagaaaaaatatatctgatacaaaacaagatctatcgaagtatcaaatgtgtttctatattcttacaacagacagttagaaaatgtaatttcacaaattttattttcaatatctgcaggtgttgagtaccaaaaaataaatttaagaaagaacaacataaatgttgagttgtatcacgtttatgcctgggaaaactcaataccagatgccaaatttttccaaaataaattgagtgtgattaatgtgattccaactaaatttaatgtgattccaactaaagtcttaacagggacttcatgagactgtacaagtaaatttaaaatttacaatgatgagcaaaggatcagtaatgagcaagaatagtaaaacaagacaattttaaagaaaaagaaccaagttgggggactttctgtgccaaatgcaacactttcataatgctgtaaggattaagatgatgttttgctgggtcagggatagacatgtaacacaaggaacaaaaatagggagtccagaaactggatatctgctgtgttaatcttctcccatgttacttatagctttgctgtaatccgtcctatgccatatccagttgttataatatcccatgttacattcaatttaatatgccaactagtggctaaagaaaagatttctgagtgggagctaaacactgggtactcatggacataaagatggcaacaacagacactggagactactgtagggggaaaggagaagggggccaggattgaaaaactactggatactctgctcactgcctgggtgatggaatcaattataccctaaacttctgcatcgcatgcgatatacccatgtgacaaacatgcacatgtatgtcctgaatctaaaataaaaatcaaaatatgaacagatagcacgtgcctgcagtcctagctgccaggaggctgaggaaggcggatggcttgagcccaagagtttgaggctccagtgagccacgatcgcaccactgcactccagcctgggtgacaaagcatgaccctgtctcaaaataaataaataaacaaataatataaataagtaaatattttctttttttaaaaaaaggaaatattcttgaatgcatttttctggaagcctcctcctggtacctcagaattctgcttcctggaatctctggcaggtagaaatgaccataaaagtttgattctactcaagacttttttggtcatggactatgacaagccacattgctgattgcagaccctcaacattttagaataaaatatagaactaaaaagatttatgacagggtgtgtctctccctctgtcttctgttcagaaaatttacccattctcaacagccttgctttccctctgcaatctgggcattgcttccgtcagtggtgtcttcacatggaattggggaattggcagctttttttcccctttcttcagagatttaaagtaaatgacaccttagatcagatagatgagcatcatccttcctcctcccttcctttttggatagatttcatcttcatctctcttgcccttctctctctcagtctttcaaggttgctgagagctcagagggaatgggattgatttcacatgagaccttactatttagggtcatcctgaacccatgcgaagcattttctttgcagcaggacagagtgcctggatttcttcttcttattgttattttattattattcatctttacctgaatgcagaggctcattctggtgaacacgtgccctattgggagttggtcttgctggacttctttgatggctggacccctggctttttctctcaaggttataagagccgggcttctgggtcagatgatgctttctctgtggaggcacaatcactctcttcttttctggctcagtgttgaggcctcccgtgctcagccgtagaggtcaatgctacagagctgactgaggcaggaggcaaggctgagcctaggatcagagggctcttgttccagggccagcagctctgcaggaatgagaccaggcaccattgtgtgaggatcctaggggatgtggaggaaggaaaggtgtgatctcagacccacccacagggtccacctgtgccccatgggctccccctgcctatactgccattgacgtctgaaagcacagcttgtaatcccataaggattgggcttctgaatcctgcctggggggccaagcagtggtttgctcccaagccctctttcagcctcactgcttagggcaacatggtgtaagcaaacaccatgatccaggcaagccagaccttcctggagcctccttcgttctggcttatctccaagtgtgtgatcccaccatgccctccgccaggggcctgtccacatccgtttccgtctttgggagctctggctatcctttaaagcctatgcagacacctctcctcctcctacccccgctaaggacacgtagcttgcgtcctacatgtttgagttacatttgccccagtcaccccctccgtggtgagggtagggctcagagctctcctcacaccaagagtgggccccagtcattgctggctgggggaggacaaaggcagccagataaaggcagctcctgcaaggacggagaggccacaggccggcatcttcacaaactgtggatgtactgtgtcttccagtagtcaaaataaagaatatatttggccattttcagactatttaatacagaacagtttacacacagaagaggagtgaggaggagaatgaatccctgcagccctacccctgtttccacggttatgggtgtttgccagcacagggctgcccagcactggtgagggggtcactgttggctggcatctgtcgggcatccccggggaagctgcgccggtgctgtggccactgaggtcctcataggggttctggccactcacatttccgaggttcttcatttcccacctcagatcactgttttcaaactcagttttcagcaacagggcctttcttcaaactcatcttatctccacccctaatgctcaaaacagataaagtagtattagcacaaatccattacaagagtttacttttatactatgtacttataaaatcaatttgcctatgggaaagaagcgtaaaactaccatcatgggtattaagatttggattttgataacatttatgtgttacaatttcatgtagctcaatattctgtttggatgaaaaacattcagaaatcactgagtcacaaatcactgagtcacaggtaagctgttgctaatagcaacagtttttttatcttgtttttacctgtttgccttgtgatctcaagagtctcttcaattaaattgatccaaatgcttgaaagaaaggcttgtaggaactttttttttttcagagttgaatcactgatctaacagatgctcagtcttgattataaatatgaaaatcagacaggaagaaacccaagcttaaaataagcaaaactttgttccccataacatgcatcaaaccacactattcttaatttttaatttatttttatttcaaaaatatttatgtttttattttattttattagagacagggtctcgctctgtctcctaggctggaggacagtggtgcaaacatagctcactgcagcctcaaactcctgggctcaactaatcctcctgcctcagcctcctgagtagctggaaacataagcttatgtcactgcactgattaattttgtcagtgttttgtttttgtagagatggggtcttgctttgttgcccagtctggtctcaaacttctggcttcaaatgatcctcccctctgggcctcccaaagtgctaatattataggtgtgggccactgtgcccagactatagaccatgctttctatgttgctgctactgagggtgattgatgggggaacgcatcccacgtctggtgcgggttagatgccatgtaattggagggacagactttaattttttaaaagcaatgcaaagctgaaatctcatttggtgactcctttataagagattcaaatgcgtgcaaattcatggccagagaggctttagtttaacttccatgcaaaaaggagttaaacaggacacataaattaacacaacggtagtctctaagagttaaaattttgttaatagtcatttgagtgtgtgacttttattaccattttcaaattcaaaggaactaaaatattggaggtaaatatttccagaaaccttgaggcgcctccatagggtctcagggctccagagaacctagcttgaagatcatgatactatccagagtgagcttgtgcaggtccacattttcagctattttgtgcccaatcaccatttataatgtgactcattaacagtcagatacagactacggtcaagcaaagaatatttacatcttgatcctacctcctcctctctctttccctatgtgtttttggaagtaagggggggggatgtgtcctttcatgacaacttggctctcgccttctctccctctctcctttctctcagtctccccctttttcccccttatccccctttcttccttcccttaaacttcatcacgtttttgcttgtttcatattcaaatcacggctttctcatacaattactacttttttcctagagtttctggttgccttttcttattataagaatgtttaaaactgtgtccttaatcaagtccatgatgtttttcagctcattatatctcctctttcttgctctgaacccatttggttctgtcctcagtactttaacatcttgctgggatttggacccacctttttctaggcctcctgctcaagtcatcctctaaatctcttttatcgatctccaggtttaatctaaaagtgtattctttctcaggtttcactctcattgttccaaagctgaccaaggaaatatatgttgggaacaagctcttcaaggctttaatgttcttgaaaacccctttttttttgccttcatgcttgggtggtttttctgctgtgagaagtgtcttcgtgttatttcttaattttttccctcccactctccctgatggagcttctgtgagtgaggcgagttcccccagccttgtcctctacgctgtcttctttctgtgttacgtttgatctctgtgatttctatcagccaaacctcccacctactcataaaaagttatttcataaatcatacctttaatttccatttttctctcttttttctaattgctatatcctcttgaatgttgtgaggacattacttttttaagaagtgatttttccttcttttcattgactcattctttttggatcttttttggtgtgtatcctccactgtgtgtcgcatgctgaagactgtcctccggtatctgtgattctaagtttccccttgagaaatctcagacatgggagaggctgcctgaggctctgtagtcatgggcagctcctgcaggggccatagtggccaaaatgaggggagctttactctggggtgctggtactttgactggctgcctgtgtttttttgaggtggtttatttttctttaccagtagggctgtgttttaagggtacccagggttggttttaatcaggcatggtgagacacttagacacagaagtgactgtcctgaaggaaagcagttttactcactgttcttagaagcagaaggacaggctaggcgcggtggctcagcctgtaatcctagcactttgagaggctaagtgggggtggatcacgaggccaggagttcaagaccagcctaaccaacatggtgaaaccccatctctactaaaaatataacaattagccgggagtggtggcacgcacctgtaatcccagctactcaggaggctgaggcaggagaattgcttgaatccaggaggcagaggttgcagtgagccgagatcgtgcccctgcactccagcctgggcaacagagctagactccatttcaaaaaaaaagggaagcgtagcacatgcagggacacagggaggcaccagggccacgcgggaggccgagagagtgcgggaaacctgagcaagggccgtccttcattgtggcttctgcaggaaggaagggaggagcagggcacgcaggcttaggtttaggattagctccttagaataattgcagtaggccctggggcatagggactcttcctggttgacttttacctggtcctgcagtgatgagagcaggactggtgtcaaccccagtgtgacagcctgataaaggatgtgtttgggtgggggtatgggttctggattgattgatttgtgtttgaaaggccagagttgtttactatctctccaaggggcctccagagtcagcaaagccccagatgtcaacacatcagaatccagaaaataaaagacaaggctagtacaggctgttggtgtaattgctgttggggctgtgtgtgtgtgggtgtgtgtcctttatcccagttgttaactcctggctgcaggaggctggaacaggggacggagaggggcagtggtgcatccgtctaaaactcgcacttacttctgttgtcttccctcactctccttcttttcatcgctaactgtggagctggaagccctctggggttgtggtgtccagctccctcctgcacctgcagttcagtcattcaagatatatatgtgggccgggcacggtggctcacgcctataatcccagcactttgggaggctgaggcgggtggatcacaaggtcaggagatcgagaccatcccggctaacatagtgaaacccccgtctctactaaaaatacaaaaaaattaaccaggtgtggtggtgtgcacctgtagtcccagctactcgggaagctgaggcaggaggatgacatgaacccaggaggtggagcttgcagtgagccgagatcatgccactgcactctagcctgggcaacacagcaagactctgtctcaaaaaaaaaaaaaaaaagatatatatgtgaagcacaaaccaagtgtgggtccgcttcaagaggctggaactagagctttggacacagcgagtgaaaaccctgccccatgaggctcacagggtggcagcgtgcctcacccaccctctgttcttctagacaccatgaaaatgtcacatctgccgatgtcctccagagttgtttacaggtttcatttggttaagagcttggttttatatacattgtgagaaaaatcaccagttcggtgtgaaaattgaaatgggggtagacactggcccttccaagctgtgcccggggaagacctcccaggccagtcccagtggtgctctcaggcagcgtgtggggttgtgaggacagacaggggcccctctcaaggtctttgctgctccatcaaagacagaccccagggcttcgggaaatccacagcctggtggcactggctcatgcagtccttttcctgtttctagtgctgatgagcgctttgacgccacattccacactaacgtgttggtgaattcttctgggcattgccagtacctgcctccaggtaagctgcacctcctttgtcctcttccagttagaaaactgaagcgagtttgggtgtcagtcagtctggccggtgcccccgtgtggtggaccagctctttgcttcgcctttgctcactcccacctcttcctctctcttctcttctgtgcttctgtgtgctttctacccccagaagtccatcctcctcttttgtctcaatcaagccgtctttgccactatgtccttattttctgccatgtgtgccttaaagccaatgtacaaatacagcgagtctcctttgccgggcagtggccacctcaccttccagcctggcaagccacctctccaggctctgcttctcagttccagcttgccatcctcctccctgcgggactcagtgtcttggcaggtgcagcgctccagctgccgggggtgagatatgacagttccaggatcctgagtgcgtgcgctaaagagcacacgcaggttacaggcaaggtctggtggtttcaagggagagctctctagcggctgacttcttcccaacagtgtctcacctccaaggctaagtgctccctggattggttctttcccaccagtccatcttttcagtcgattcacagggcaagggaaatgggtttatggcctaaaggtgcatgcagagtgcgcactagcatattgataggaacagctggggtttttgatcttttagaagatttttaatgtgtttattccagggtgatctcccacactgcagctgtttaactttctgctcagaggcaacctgcaattacctccacacctaactaccactcacacatacgactcacacacacaccactcacaaccactcacacacagccactcacacataccacacaccactcacccctcacacacaccactcacacacatcactcacataccacccacacgactcaacactcacacaccactcacacaaccactcacataccacccacacgactcaacactcacacaccactcacacaaatataccacccacacaccactcaccactccacacataccactcacacaaaccactcaaaccaccaacacacacacaccagacacacacacacccctcacacacaccacttacacaccactctcacacaccatacacaccactcacacacgactcacaaccctcacacacaccacttacacacatgcaggcatgcactctcaaaccagatacactattcacaccactcacataccacacatactggctgtgccttctcggttgctgtctgagtgccttccctgtcagcaggtgacaagcatctgggggcacagtcagcctttgctcaccttagcatttatccctgaatgaacaaaggagcgagtgaacctgtcaatggtagacacctcccaataatattggaagagattgaagaagtccagctgttcaggcttctcgaagcatccgctttcctgctagccctggcatttcctcctaccagcaggacccttgcaaacaggggtagtggggggagccttccatcactcccgaggtctttctcgccaggcctgcgtgttgcagcttctgttatgagggctattttagaaaacagcctccggtagtcaccagtgtagaatatgctgctgcaggttgtttggaaggctgaggctattttcagctgcaggaccagcactgcaagcctcgagctgcctgagtgcagcagccccctctggagctccaggcctgtgtccccactgcagtggccctggattccggtcaggacaggacacgttgtcttgtgaccatgaggggcttccttacgctggcaggaaaggcccagggccgcctggattgggaaacccctgcctgctccctgggagtgtagaacgagtcccaggatgctgccctgtctgtagttagaggggcatggataggaaagaatgttttgagttcaagctttgaaatagagacttgaccataacatgactttcccccccatttcatgtgtttattttttaacagctttattgagagagaatttacatatcatgcattttaagtacatgattcaacaacttttagtatatttacagacttatgcaaccattaccacagtctagttttagaacattcccatcaccccacaaagatcccttttgcttgtttgcagttaattcccattcctactcccagcaaccactgatctgctttctgtctctagaaattctctgtctgtctcgggccattatttcgtagaaatgggctcatgaagttacaaagctttccaactaactggcagacaaggtgggttttggggggatccaactattaatggagggggattgtctgtgatgattccagattcctataaacatttcatgtaaggacgcaaagcatacttaaaggaacttcaggggacaaaatgtgtatcttttcccaactcggttgtggggtggggtccttgtgtgcaaggctgtggaggcccttcctgcgtgcactctttctgtaactcagtaacagaagtttgcagagtgccagccctgccccaggaacacctggacaccgagtctgtgcctgtcttcttgtgccatgcagccttcctctgggcagggaagagcacatgagtgtaaataactggagtggcctctatctggtttcctccccttggccctctgggaaatccacttccaacctgtcctagcctggaatagctcttttcagcggaaactcttccttcaagcaccatctcttcagcttaaacctatctatctgttcttgtttttgtttgtttgtttgtttgtttgtttgttttaactttttttcttacagacagattctaggtgtgttccccaggctggagtgcaggggctcgatcatagctcacttcactttagcctcaaactcctgggctcaagcaatgctcctgccttagccttctgagtagctgggactacaggcatgcatcacctcacccagctaattttttttattagagatgtctcactatgttgcccagtccggtctcaaactcctagtctcaagtgaccctcccacgtcaatgtcttagagtcactgggattacgggcatgagacactgtgcccagcttgttctgttcttcatctagaatttaaattagttaaaattctagctttaaccagaattctagattgtatttctcgataatcatgtgttcttcccatttttaacctaaagaaaatgcctacctcaccccgcaccaaacagacacacacacacacacacacacacacaccttttagattctatttctaacttcatcatcagggttatcaacttctctgagatattttgcattctttacttttattatttagagtctgaagatgctcatggtaaatgcagattatagagctaactttttgcacaaaaagcccacaaaacagtctttgagagagcatgtcagtgttacgtttggattttaaaagacagtgaagcttagctgagattctgttttacagattttgcgaataaataaaaagacagattccatttgctctggactgtgttagctgcagtgcggagggcggaaccggctgaaggaactgctgtgtattttcagcacatctcagtcagcttccgtttcagtcttctgtttccatcacccacacaggcatattcaagagttcctgctacatcgatgtacgctggtttccctttgatgtgcagcactgcaaactgaagtttgggtcctggtcttacggaggctggtccttggatctgcagatgcaggaggcagatatcagtggctatatccccaatggagaatgggacctagtgggtaagccatgggactaaccgcctggaagaaagctttcctattcctgggcaagctttaaaagtttgggattttccactgtcctttccggtgcgagcatttattgaattttgcagtagtctccataatttactgagagctacaggaggagaaacagaaaacagttaggatatgccatgctttccaagaggaactggcaactgcagtgaggatgcatttaaacaaaccagtgtgaggatagatctctctacgttatgcagatccactccatttctaaaagcaagttgaacagcaaatttcagttgatgggaacctatatttgattattttaaaataggaaaacagtgattacatttataacagtgtaaaattggtaatgtattatttataattattataatcatgtgtttccaatccaccaaaagaatatgtaccaatttggccaactatcactaaaatactcttaactctatagtaaatcaacaaggttttattcaagctaattacaaccccccccttttttttttttagcactttgcaaactttaggactgtgcttgtgtgtggtatacacattgaaataaacagggtaatttattgtattctaacaatggctccttctctcctcctccctatggaggaatccccggcaagaggagtgaaaggttctatgagtgctgcaaagagccctaccccgatgtcaccttcacagtgaccatgcgccgcaggacgctctactatggcctcaacctgctgatcccctgtgtgctcatctccgccctcgccctgctggtgttcctgcttcctgcagattccggggagaagatttccctgggtaagcgccccagtgtctggcgggagtctgagactggagaccttctgctgagatcagctctggagggctcacagcagacagcgcaggactccatcagggttcctggggattccctggctcatcccatggacctccgagcccacggtggctccaggacaccagaggtccctgattcgggctccgtgctggacggctgtgtaatcctgagaatactggaggaccctcagaggatgggggatgcacagggagggggccagctccattctgccttgagaggcctgtgctttcttccctcctgccaccccacctgttcctcaatggcgactggtcatcgagggaacaatttagcttagtatcagcttgcatttgtatgttacagtacccagtgtaattcttacgatcactcccatacgaagctaaggaaaccaagattttgaatggtggaatgagtttcccaatgtcttaaagagttgctaaacatcagatgtagcatatggtagaaatcattcccaaacccatatcttctgagtatgaggttcagaaaggttgaatgttgtatctaaggtcacatagctagttgagtagcaaacgtaagacctgaaatcaggtctcctgactgcatattttctttttcctgctacgtgaaactacttctcaataatattttacagagaatatgagagataattgtgccaagttaaatttttcagtttgtgttgatgcttttaaaattctgggtcctaaacttgtctccataagagactcctttgggactctggtaagtggcatggaatgtcccctggaaaatgcacacgcccatacatagggaaaacgtgcattccacgacattccccccagcgcctccctttcttttgagtgtcaggttaggagccctcgttagacagaattgaggccttcttgtctgtttttgtctgaggaaccgctgtgtgtttatgttttagggataacagtcttactctctcttaccgtcttcatgctgctcgtggctgagatcatgcccgcaacatccgattcggtaccattgataggtaaggcaagagttgggctcctctcttagagatatggggttagggttagagtgtgcccaggatttcccagcagatgaaactagaagaaatagggctgcactgcccccattttctctggaaggtgatgatttgctgtaactattcagagtcacccaggcccaagtaaggggaaggggatattcagctttgaggtttgacttttatctcacagaaatgccccccttcccctcataattctcctcctcatgcttgctttgaagccagatatttcatcgttagagatgcatcattttagcttaagatgttgttttcccacaaagcctttgttaaaatgggagaagcacacagttactgtgtcctgagataactcaatgtctctgtataaaagtttctagggaaatatgaatgagaaaaatatattttgcacaggtataaggcatgatcctctacccagggagggacaacaaaaacaagtctccactcccactgggcagggaaggttggaaggaggtatacagactgtcattacacctgctggcccctgctgtttgaggacctatgctgtgtctacctgggggtgggctagagggagagccctacctggatacccccaggctttaggaaccaagcagcaaaggcccttctttgtggaactccctgtatgtgcagtattttggccagagaaactgttggtatgaaaagcctttgtgggtatcatttttctcttggtaccatccagacagggaagaaccacctttccacctgattctgactccattctttctaccttccagcacactgctttcagtagagatttgcagcctcccttccgggggcagttgtcaggccttctctctctggactgatgacccgctgggaaaggcttggttggtgcatagcccacatctcgaaggatgggatgttgatggccccagggacatcagctttgctgccctctgttgatggaaattcagtctgggcaatcctttgacccccatctctccagaggtggttggtctgctcaggctgccgtgacaaaatactatggacttaggggcttaaataactaacagaaatttattttctcacagttgcactgctgaaagtccaagaccaaggggccattagggatggtttaacctgagacctctccccctggcttgcagacaaccactttcacaatgctttgtcctcccctggtagttcctctgtgcacctgcatccctggtgtctctctgtgtgtccaaattttctcttcttcattaaaagaacaccagtcagattggattagggcttaccctgatgacctaattgtacttaattacctccttaaagaccctatctccaagtacagtcacattctagggtactaggggttggggcttcaacatatgaattctagggggaagcataattcagctcataagggtcacggtttgctccagtctccttccttttctcaggggccctgatgctaactttaggtctcaaacttccagctctggcagagctcctcccaggtacctcttggtctttgtaggaaggcagtgagttccttcctggcgtgagggcctgtgagggctagctgaatgcttagcgccctgtaccctgatgctttccgcttagagttcagccccttgagtggacagccacaccaaaggtttaataattagagctgcccactaaagaatgccccctcctttctcctagacatcttggcctgtgtaattgctcatcattgcacaaatcctgcaaggaagaagttcctattttaatggaggctaccgtaacaaattgctgtagtctgggggcctaagcaacagacatttatttctcagagttctgcaaggctgcacgtcctcgataagggtggcagcagggctctggtgaggggccactccctggtttacagctggccctcttctcgctgtggcctcacgtggcaaaaagagagtgaattagctctttagcctctttttatgaaggactctaatcccattcatgagggctgcaccctcaggacctgttgaaggcccctgagaaaatcactcaccatttctctacttacacaacacttctgacaccaaagcggggcgtttctcccacatcgaccaattcttggaaaccagctgggcgtcctacagtgagttcacttcagtcctgacaccacctggagttagcacagcactcacagattaaggctcacaagaccatttctacttgagatgccagttagaagttccggcttcccatgcttctgaccaagtgtctataaatcggggagttcccaaaagcacatctttgagttcagccatttactagagtgactcactctagtaaactcagggaaacattttactgatatttattcattaattataaagcacagatgaatagtcagatgaaagaaatgcatagggcaaggtatttgggaaggggcatggaactgccatgccctctctgccctccaaacacctccccgtgttcagcactgggaaggtctccacagaactccatccttttgggtttttatggaggcttcactacataggcatgattgattacatcattggccactggcgatccactcaaccgtcagtacctctttcctccccaggggtcaagggttgggagaggggacagagcttgaaggttccaactctctaattacttggctggttcccctggcaaccaaaccccatcctgagggtatccaggaacctcagccataaatcatttcattagcatataaaaagacactgatgacttcagagattcaaaggttttaggagctgtgtgccaggaaatgggaggaagactaaatacatatttcttattataaatcacaatctcatacctcccaaagccccacctccagataccatcccagttaggactagggttttaacccatgaacttcgtggggacacaaacgtcatcctttgtaccacccccattggagagctgaggcccgaagaggctgagcatccactccaaactcacagccagtagctagtggaccaggatggaagcactcagatgctccatgctgcccctcacctgggcccaggtggaaggacacccatgacccattagaaccaaagctgagactgaagttctcgtcctgaaaagtccctgccactgaccccttcctcaggctggacagctggcagccaggtggtgtgcaggtttgccctcattgtgcccctggagcacagtagaggcctgcatcatgaacactggatggttcccatgccctcacatccagtatttacccacaggaacaagcttatcaccatcctgccaggcgatgctagctcttattgactgacaagtcggccagagtgcatggaagtgcaatgaagtgagggaaggtcactccgtgggcgggaagtcagaccacactggctggttttgcccacccagaatgtgggctgcaggcctggacacatgggcatcactgcaccctgaggccctgacggtcagagaacctgatcagggtgtgcctgtcctgtgacgtgcagtgccacaggatccccgggtctcaccctgcatctgttctctccacagcccagtacttcgccagcaccatgatcatcgtgggcctctcggtggtggtgacagtgatcgtgctgcagtaccaccaccacgaccccgacgggggcaagatgcccaagtgggtacgttcctcccacccccgatggagtcggagcccccctgtaaaggaggctcctcctagggtttatttttaaaatcacacaaaaaatgggcattcctaaagaaatagctttgggttttttgtttgtttttttgagacggagtctcactatgtcacccaggctggagtgcagtggtgtaatcttggctcactgcaacctccacctcctggattcaagcaattctcctgcctcagcctcctaagtagctgggactacaggtgcctgccaccacacctggccaatttttttttgtatttttagtagagatggggtttcactatgttggccaggctgatgtcgaactcctgacctcgtgatctgcccacctcagcctcccaaagtgctgggattacaggtgtgagccattgttcccagccagaaatagctttgtttctgtatttcgtcacctattgacgtgtctttgtgtagtgtgcagtcatggtgcacgtgttcccggatgccccgtggcactgctgtctaatctaactgcagagtagagtaaggctctcaaactggctgccctgtgtgttctatcaatcagcacggtgttttgagaagctagtttgttttttgatgcatgccgtgaagcactgtgctgcagttggaagcaacagatgagacagatgcgtagcaacatggttgaggcttcacaacagaatgaggagcaaagagtaagaaacggaatgagctgtgtacaaatatgtacgttcagtacatctagggatatcatccaaccagaagtctatgaaacaaagactaattgtcaccagtgcagaagggggaagggataaaaggaaacggatgaaaacagaaaggatggcatcccacagcctgtcagcttagcctgggccataccactcctgccccagctgctggcaccgtgcccggccacatctgcggatgctcacccacccagggatcctctcctgcacggtgtccagagctctgcatccacccttgcctggcagtcaggaaaccttgatgagggcctagggagggcctgagcttcttcccctcttcatgtgagctttgtaaagcttccccgtcctcctgtctagagagcctggcctaaggatttggggagctaaaaaggccctcacattccaaaagttgtctgtctttggagagcacttgtgtcccagttcagaagggaatctaggaatcaccaacaagctaaatgcagctgtagggggtgagatgctgtcaggcaccctccaggaataggggattgctgggcctcctgaaacagtcattgtggagttgttacctgaatgctcacttagcaaagactgcttcttaagaaatgctttacaaaattactgtttcttctcagagtttcacccacatggcccattccccttatacactatttagtaaagacttacctgtgagcccaccacagtggtgtgtggctgtagtcccagctacctgggaggctgaggtgggaggatcatgtgagcccaggagctccaggctccagtgagctatggtggtgtcattgccctccagcctgggtgacagagcaaaactccatctcctaaaaaaaaaaaaaaaaaaaaaaaaaaaaaaagactgacttgtagctcattacacaagcagtaatgtgagctcagcctacatggtgatgtctcacacacagaccacatcactacattccctgaggcttgttttgtgaaggcccccccttaaaacactggggtacatttgcacacattcacctgtatttttgtctgatttccttataacgctgacccacacttaagaaaatgcaaggccagaggtgagaggcctgagagctggaggcttgttggtttgctgctctttctgtctgtccatccatcagtttgaagcaggtaatacatttacctgtttctaaagtcaaaataaaattaaaattatacataaggaaatcctgctcccattccttcccctttaccctgcatctaccgtcaatactgataaccgttttaatgaattccttatttttccttctagtatttatttatgcaaatacaaaaatctaaacattctcatttcttgtaagtattttgactgatgagaagataagagaattaagacattgagacacaaaaccatttttaacgacctggagcactctactgctctagaacaatcttaattaagaacatatgctaattattcacctctcagcataaaagcttattaaaaccaattggctgcaaatgaaagatgaagcttatgcatttctctcgctttatatagcacactgcatttttctttcattccatgtgtatgtgaaacacaaacagcctccgagggacttttattatgatctgttgctatgaagaagatactgccgggtgcagtggcattatgtgacatttgcacagccagaaacaaaactgtagcctaacagaagaggtcaagagcacagtttgaggagtgccaagaggataattttatcttttaaatgctttggctttgaaagttaatgattcaggccatggaattcaaaatggacttggcagagtgtatcgtatgagcttgagatgtgcactgggggacgtgtagaccctgccatggagggagaagtgcctggtgctgctcgctccctgtgtgcactgctgccactggatgcaggcacactcactgccctgcagcctcccaggagagctggctcaggctttctggtgccttcccagaggggtggggttgtgcgagttttgaagagaatcttacagaccctttgacagatgagactgggaaaggctaaacatgtgaagtgacataaccacttacttactcattgtacatcgttgggccagtttattagcctctttgaacctcagtttgttggtctgtaaagtgaggggattatactcatttcaccggaccctgaaaggcccaagtgagatgacttgtctcatgagccttgtatggacggcccaactcacccaaggtttcacctggggccatatgtccctgctccttactgatcataaaaaaccctccaaggtcagcagacccaacctttccaggacacgcagagtgccgcctgcttgtaaagtacaatgggaaacaaagggttatttttatagctgcaatgaaactggtcttgtgcttccctgttcttgtccccagacctgtttgttgcagttatctttgataagatgttataaaaagatgaccaagaatgaaagctctgcagatacgaactgcacaatttactatctgtatatttatttcctaaagataggaaataaacctgttaggttactgatggaatttccccaaaatcataaaacaaaatgtaaatgaaatcaggatctggataatttcagggaaaaggcccacttttcatacactttacatggatgggcttgcaagaatgcttctttacctggattgaggcttcagttgtctctcttctttccatgagaggcaaaaccaggataaactccatggtgatttttctccagcttctttcatgcactctaggacacactttagaccagaagttagcaaattatggcctaggtggccaaatccagtccaccaagtgtttttgtaaataagttattttagaaaacatgcccatccatttgacgccttcaatgtgtgctacatcagcagaagtgagtagttgcctggccctttacagaaagtttgccaacttctgccttcaacttttcaaagtactctcccagacatcatcttattcggtcttcattgaagcctactgagttaggttagaggttccgaaactgccttggttcacagcacgttagtatctcaggaaatttttcacagagcccctggccaaaagaaataatacccaaggctctctttttaaatagatcaaaacactttaataagtatttatgccttaacaatgtagcacctatggggcacggcaccgcctctcaaatcttgggatcagattggagaccactaacctagtttctgtttcacatgaagttccttggtgtttgctttttatcagggtactttgaaaaacagctttgcaaagtggtcacgtcatcacaagagatgtggtaatctgatgttggaagcctgaagtgcttcaagcttcaagtttacctggtgtctcatggatatcctgggattgcatttgaaaatgtacaacctcccccaggcactctttgcgaatttgcagtggccttccagggcacctaacaggtagtgtgggagccagagttagatctgaaggtccccgggttacagatgaggaaggatcagagagggaaattgactttccctctttacacagctcagatagccttccccttccacgaagctgtcctccctgagattgcagtgtgcctgccccggagaacaatttagcttgttcccagggtgcatcagttttagtcttgcctcacgttgaactcgactgcttgtcatacgcaagcactgcttgcctgctaaaatcatctgggaggcagtggaggctgctacccccaggaccaatgaagcagggcttgtattgtaggatcttactgctgttgggatcagcccgtgtccgcctcagggctgctcttaacgttctgttgtctccccagaccagagtcatccttctgaactggtgcgcgtggttcctgcgaatgaagaggcccggggaggacaaggtgcgcccggcctgccagcacaagcagcggcgctgcagcctggccagtgtggagatgagcgccgtggcgccgccgcccgccagcaacgggaacctgctgtacatcggcttccgcggcctggacggcgtgcactgtgtcccgacccccgactctggggtagtgtgtggccgcatggcctgctcccccacgcacgatgagcacctcctgcacggcgggcaaccccccgagggggacccggacttggccaagatcctggaggaggtccgctacattgccaaccgcttccgctgccaggacgaaagcgaggcggtctgcagcgagtggaagttcgccgcctgtgtggtggaccgcctgtgcctcatggccttctcggtcttcaccatcatctgcaccatcggcatcctgatgtcggctcccaacttcgtggaggccgtgtccaaagactttgcgtaaccacgcctggttctgtacatgtggaaaactcacagatgggcaaggcctttggcttggcgagatttgggggtgctaatccaggacagcattacacgccacaactccagtgttcccttctggctgtcagtcgtgttgcttacggtttctttgttactttaggtagtagaatctcagcactttgtttcatattctcagatgggctgatagatatccttggcacatccgtaccatcggtcagcagggccactgagtagtcattttgcccattagcccactgcctggaaagcccttcggagagctccccatggctcctcaccaccgagacagttggttttgcatgtctgcatgaaggtctacctgaaaattcaacatttgctttttgcttgtgtacaaacccagattgaagctaaaataaaccagactcactaaatcctttccaataattgactggtggaaggaaaacaaaaaacaaaaactaaaaacctcttagcttttctgcaattcaactttttatttttatttttatttctatcaaagacggtagagagaaacagcttgatgctgtttctacattaaaaaaaaaaaaaaaa

SEQ ID NO: 53 - DNA, 4110 bp, Homo sapiens
aaaaggcacaggctgggcacagtgcctcacacctgtaatcccagcactttgggaggccgaggtgggtggatcgcctgaggtcaggagttggagaccagcctgaccaacatgatgaaactgtctctactaaaaatacaaaaaattagctgggcatggtggcaggcacctgtaatcccaagtacttgggaggctgaggcaggagaatcgcttgaacccaggaggtagaggttgcagtgagccgagattgcaccactgcactccagcctgggtgacagagtgggactgtgtcggaaaaaaaaaaaaaaagaaaagaaaaggaaagaaaagaaaagaaaaacgcacagaaattttaaccaaccaggaggcaaccagactctggggaactttcaagatccttatcacaatttcccaccccacccaccctgttacttcctctacttttctctctcttgttgtcttgtcttgaccctttgtgctgcaaaatgggtacccatacatggggctgggggctttagaccagtggatgggtctcagtccacacaaacagctaatctggatacacgaggccaaaaccttctcatttttctgggcaactttttttcctggcccaaaatgttttgattgttgttaactcacaggagtggggtagaccattaaggctaatttcaggcccaatattgtcatttttagaggagaaaagtggaaaccctgggcacttgcctgggtagtggctgaaccagaggtgacaccttgctcagtcccagcacagccccaccatgcacccggcaccacaccaggcactcaccctcttatacaacaggacaggtggcgtgtttgtgaaactagtggaggtttgtgttcaggaggtggaggagggaggacaggaaggagagggagaagagcatgcactggagaagtaaatccagggatcacacacagccacgtcctcacaatgcatgcttgagatcagtgtttgtactaagggcaatggggagctattgaagactccaggctggaagcaacacaggcaagagtgtgtcttagaagcatctctgttgcatttggtaggctgagatagaggctaagctgaggctgttggagaactcaacagcggagggtgttggcttgaactaaggaagtatgttgtgtaaacgggagtgctgtgacctgttgcagtcttactttcccactgacttctatggagtatcagtttcctgttgcctctgtaacacactgccacaaactggactttagaacaatagatgttcatcatcgctcttcccaggagtgtccggagggaaccagcccctgccaacacctggaccttaggacctctgacctccagaactgggagagactagatgtgtgtggttggaagcctctaagtcagtggtcatttgttatagcagtgctaggggcactaggaaacaattaccagaggcaagagacaaagtcttattagctaccctcctctgaaggacagaaaggaaaatatgagaccaggagggtgttgagagccaagtggattgaagtgaaggcttggggctccttgtggattttgtttgtgtgggttattttgttcccaggagtctcaggctgtgtagccaaatgcagtctgcagttctactctttcctttctttgaaagcaaacagcctcttttggaagagtgaagggcacccgaggttccagctggggctggcccaggccacggagctctcagaatgcgtacagcgcagacagcaccctgcagttgggtgggtgctggctttgaggtctggagatctagatgcccacaaggtgcccctggcaagtgggggctgcaaaggcatcacccaccccactgggctggggcagagaaatagacatgatgcatctgatgagctcggaaaacatttctaatgtatttattttttgtggttcggctacagaagagaataagaaagggctgaaggggatgaatgaacaagagcaggagaaggactgccctgagggcaggaggaaagggtgtgaatcgggatagaagtcagaaccccaccagcttcttgcctgggaaccaattgctggagctgcttccttccttcgttcattcctgctttcttcactccttcattccctgaacatcagacatggtcataggccctgctgagaattaaaacagaacaatgaacaagtcccactctcagaacgcaggcagaggtgaaatgttcggtgggctatggtgatggctttggagatttactggtagcttctgtggggttactctggctggggaccccaggggcctgctatggacagaattgtctccctctcaaatttgtatattgaagtcctaacacccagcgtgatggtatttggagggggggactttggagggtgattgagtttagatgaggccatgaagctgggaccccatgatgggattggtgtccttacaaggagaggaagaggctggagctccttctctcaccttgtgaggacactgtgggaagccacctgcaagtcaggaagggccctcatcagaagccaagtcagccataccttgatcttggaattccagcctccagaactatgagaaacaaattcctcttgttgaaaccatgcagcctcagctggtggaagcgttcggggtgagcatggctcctgcagggagatggagcagggacattgtgtcaggtctaaggctgctggtagagcctcagcttcctttccttggcactcaccaggccatgctgggaaagaagtctgagccaggtagttcggaaaacacccccttggtaactcttttgggaaacggagacagacatcaaggtcttatccactttgtgcaggaagatgacatgcggtaataaggaaaagaaaatgggaggtcctctgtctcatggaatttggggtcacaagtgtctgtacaacaccttactgggtctcaactcccagcttctcaggaacaagagacaaagaatataggtcagcagagcagagcccgaggggctggtccacagtccaagtcacacatgatgaggacagtattgagagtcatcacatgatgatggcagtgatggtggtagtgatgatggtggtgatggtgatgatggtggtgataaaggtgccaccggcgtcgccgccggcgtcactaccggcgccatcatcctcatcatcatcaccatcatcactatgaccatcatcaccattacctccatcatcaccaccatcaccacatcatcatcatcaccaccaccatcatcaccaccaccatcatcaccatcattaccatcattgtcatcaccaccaccaccaccatcaccaccaccaccatcaccaccaccaccaccatcaccaccaccatcactatcattaccatcatcatcatcaccaccatcatcaccaccatcattaccatcattgtcatcaccaccacggccatcatcgtcatccaggtcccgtcattactatcatcgtcatcaccaccgtcttctcctgcttcttctccatcattatcattgctgctgtcaccaccatgattatcatcatcatcatcatctccattgttctcatccttcttctcctccatgtgcctctatgtcttcccatacctttaacatgggttccatgactccttagcatggctgccatcatcatgtggatgtggatggtggtggtggtgatgatggtggtgatggtggtgatgataaggatgatgatattgattatgagagttgtcttagtccatctgggttgctttaacaaaatactataaattggaggccaagcatggtggctcacacctgtaatcccagcacttcggaaggctgaggctggaggatcactttaggccaggagttcgagattagcctgggcactacacaggaggatccatatctctacagaacattttaaaattagctgggtgtggtggtgtgcacctgcagtctcagttactcaggaggctgaagtaggaggattgcttgagcccaggaggttgaggctgcagtgagcaatgatctcaccactgtgctccagcctgggtggcagagcgagaccctgtctctaaaaaaaaccaaaaaaacccataaattaggtggcttataaacaacagaagttcctttctcata

SEQ ID NO: 54 - DNA, 146337 bp, Homo sapiens
gcgcaggagggcagcaccagaggccagtggcactcccagctcggtgagagggctgggaagccagggaataaaactgggagggtggggtggggctggtgtttggggcacctcaaactcacaacattgggaatctttgtgggtccgggaatggtaatcctgaggcctcagaacacaggtttcagattgataggcctgcaggtctccaggcagcaaccagctgagcgactaaagggcccaaggccagggctctagggatggggctcagcagaggctggggtaaggggagccagggaggagctgggcctaatgcagcaccgggtccccaggatgccgtgtctcggctggaggaggagatgcggaagctccaggccacggtgcaggagctccagaagcgcttggacaggctggaggagacagtccaggccaagtagagccccgcagggcctccagcagggtcagccattcacacccatccactcacctcccattcccagccacatggcagagaaaaaaatcataataaaatggctttattttctggtacctcccagactctgatgactggtcccctagacacgcagtttgctgaaccaaccagccctagagcttcccctccaccgcgctgaggggactgacccatggcaggggatgtgggatgccccctgacttactacatcacaggaacagggccttcgtgggtagaaaccagccatgctgatgtgggccaggaggctgctctccgtttccgagctccttctcagagctgacacagctgaactatttaaggccctagcttagaacctcaataattcccaaatttaccaaaaatctgcctttcctagtcaaccaaaacatcacgttgcacgtgactctgctggcactgttgcttgtgaggaaatgaaccaaccatcacttacagggtaggcatcttttaaactgcaggtccaaagataaaaataacgagggaggctgggcatggggactcacgtctataatcccagcactgtgggaggctgaggcggcaggatcatttgagcccaggagtttgagacctgcctgagcaacacggcgagataccgtctctacgaaaaataaaataaaaaattagccaggcatggtggtgggcacctatagttccagctactcaggaggctgaggcaggaggatcccttgagcccaggaggtcgaggctgcaatgagccattgcaccactgcactgcagcctgggtgacagagcaagacactgtctctaaaaaatataaataggccgggtgtggcagctcacgcctgtaatcccagcactttaggaggccgaggtgggtgaatcacctgaggtcagaagttcgagaccagcctggccaacatggtgaaaccccatctctactaaaaatacaaaaattagctgggcatggtggcaggcgcctgtaatctcagctactcaggaggctgaggcaagagaattgcttgaatccgggaggcaaaggttgcagtgagccgagatcatgccattgtactccagcctgggggacaggagtgagacttcgtctcaaaaaaaaaaaaaaaaaaaatatatatatatatatatttttttttttttaaatgtataaatacatcatatatattttaatatataaatatattatatatattatatattttaatatataaatatattatatataatatattttaatatataaatattatatatattatattttaatatataaatattatatatattaattatatattttaatatataatatatattatattatataataataaattatatattatattatatagtaataagttatatattatactatataataatatagtataatatataatatatattataatatattatattatattatattatatattataatataaattatatatattttatatatatgttttatatattatatattttaatatatgaaacaggggaacttcttctaaggaaaagacagaattaaggcaacaggctgatcctagtttaccagagaagaaactgaggccgggagcaggagcccagctcactgaagggcagatcccaagtcagagtccaagtctccccacttttttatttatttaattttttctgagatggagtttcattcttgttgcccaaattgagtacaatggcacaatctcggctcaccgcaacctctgccttctgggttcaagccattctcgtgcctcagactcccaagtagctgggattacaggcatgtgccaccacgtccggctaacttttgtgttttcagtagaggtggggtctcaccatgttggccagactggtctcaaactcctggcctcaagtcatctgcctgcctcagcctcccaaagtgctgggattacaggcatgagccgctgtgcctggccttatgtctccccttttgaattcagagccttcccccgtgtagtgagtgcttctgcctctctagcccttcctgtgggttctgcctgggcctgacctctgtgagagacctggcaggaacaggtctgtcaggccttgtggggagtgggtgtgggaataggttttgatacccaacttagcaggtgatcctgagatgggaggacacagggctgtttgggatgggcgtcttagccatagtaaggtttggttcatatcaagcagggaccacccatggcgtcatttccaggccccacctcttcagtatgccatagaaaactacttgggcagtagaggtgtgggaagaaaacaaaaaagaaagctgggcataagtggcacacgcctgtaatcccagcacttttggaggccgaggcgggtggatcacctgaggtcgggagttcaagaccagcctgaacaacatggagaaaccctgtctctattaaaaatacaagattagccgggcgtggtagcacatacctgtaatcccagctacttgggaggctgagacaagagaatcgcttgaacccaggaggcggaggttgtggtgagccgagatcgtgccattgcactccagcctgggcaacaagagtgaaactctgtctcaaaaacagacaaacaaacaaacaataaaaaaaccccaaaaattagctgggcatggtggcgtgtgcctgtaatcccagctactagggaggctgaggcaggagaatcgcttgaacccgggagggggaagttgtagtgagccaagatcatgctactgcactccagcctgggcaacagagccaagactctgtctcaaaacaaacaaacaaacaaacaaaaaaacgcaggaaaagagtgtgtgatggctgaaacttgcaatttctcactctcaacgagccctggccccaactaggttatttgggctccctccctaggtctcagggacctctgttcaaagtcctagcaatctgggccaggtacaatggctcacgcctaaaattccagcactttaggagaccaaggcgggcagatcacttgaggccaggagtttgagactggcctggccaacatggtgaaaccctgtctctactaaaagtacaaaaattagccgggcatggtggtgcacccctgtaatcccagctactcaggaggctgaagcacaagaatcttttgaacctgggaggcagaggttgcaatgagctgagatggcgccacggcactccagcctgggcgacagagcaagaccctgtctcaaacaacaaaaaacaaataaaacaaacaaggtcctagcaaccctactaacctgttatgaagactgatacaggggcatcacctgccccaattttctgactcaggtcagccttatattcctactctaatctcacccctatccccgtcccacacccactattcttaaaacctccatggtcctccgggggcagctgtagacacattaagcccagggctatggggccactggaaccttctccagtgggtctgaaaacatcagcattccaggagttgatgagcccctacctgggcaccactccctcttgggcctgagaaggccggggggaacctgcaaggaatatgtggaattctatatggtgcctctgatactgcggtaatgtcagggagaggtttgttcaactggtcagggccctgaaaccccgatcactttctcatctctgcatcttgaaggctagcagagaggaggaaccctgagctctctaggaggtgggtaggtggtggcagtacagactcctagatgtctaaacggagttgcagagagaaggctttctcggtagaccctggaagggacttttacggtagaactttcattttacaagcagggatagaggcctagatggggacagagacgtgtccaaggtaaaacaatggacggaggcagggcagggagaggccaggtcctagactcggcctcagcacccctcccacacacacatcgacacagaagctggtccagatttataatttaatggctgtgcagatcccagtccctcatttctgtcgctcacgtgcccactggtctggggtcagggttttctgttcaaaggcatggatgtgcgggagctcttctgctaggcacgcgttcaccagcctggggcgagagatggggttaggaaaaggccagcggtgatcgcacaccccgaggctagggtgacccaagagactggtgtccccaaggttgtagtccccaggccgtgggaacacgtacttggagagagggtctacatcgaaatactcgaagcaggggtcacgaaggcgggatcctcaaggtccctgagccacgccagggggagtgcgggagtcaggttgcaggggtagggggagtggctggggttgtggtacaggagctaggcaaggtgctcccagggccttacctgtgtctctgaagcagcggtttcccctcgaacttggccgacaccaccaggactcggaagctacaggagcaacggttgagggtcgtgtcctccacctcctaccgagcggaagaatatgaatggtgccgaacccgccccccgagctcttttccccttgtccggcggctcaactcaccacatgctccgcctccaggtcccgctgcagcttctcgcggaggtattcggcgctgagttccatggcggcagtccagctggaacggcagcccagcagggacacaaccccagctcgggcgccggccacgctaccttgctgccttacaggagccacttccgctggaaaactcacttccgcccttactaaggcgtacgtcaacgcagtacttccgccctcaagcagccgggctttccagcggtccaggcttttcgcgcttgccatgtgtcagccaatcagagcctgaggaaggtgggactcgggcggagccgatgctgaatggtacgcgctcgccgactggacagcagtctggcttccgcggtcggacttctacacccgcctccagacaggagaggggcacgtaccggcgctacggcttcctgcaggctgcctccggatagtccccgagagcttgttccgaagcaagcaccctgcagccctagcgatccagccctcccctggaccctaggtcacggcaatcaaccccctgctgtggttcccgaaccccaaggcccgatgggtcccgcgggggtcgcggcgaggccagggcgctttttcggcgtctacctgctctactgcctgaacccccggtaccggggccgcgtctacgtggggttcactgtcaacactgctcgtcgggtccagcagcacaatgggggccgcaaaaaaggcggggcctggcggaccagcgggcgagggccctggtgagagggggaggccttctgtgccgggaggaaggcgtcccagaggaggcggaccccgcggggcacaggcctgttgagaaggaccggccaggactgtgacagaggcggggcgtctgtggtggggacggggcctgtcgcaggggaggagcgtgacggggaggcggtgcccggggcatctccgcggcggaactcagggaaggagctagctggggcgggggtgatgatccaggctgggttccagcatagggctcttggtgggcacgctggggtcgggtggaatgcaggagagagaggaggtgggacaggtgggtacctgggctggaggcagggcctgaggtgggcaggtgcagagggctgcacttctcggctgaagccgggaatgaggaccccgctctcgggtgggattggaggggacccgcggctgaggcgctgggctgcgacagggacatcacggttctcctcctcagggagatggtgctcgtcgtgcacggcttcccgtcctccgtggccgcccttcgggtaaggaaggagaccgggcagcggcggccgggtgagggcttgggttccgcccctcgctccgagccgccctgatgcccctgtacgccgcccgcagtttgagtgggcttggcagcacccgcacgcctcgcgccgcctggcgcacgtggggcctcgcctgcgaggagagacagccttcgctttccacctgcgcgtgctggcgcacatgctgcgcgcaccgccctgggctcgcctcccgctcacgctgcgctgggtgcgcccagacctccgccaggacctctgcctcccgccgccgccgcacgtgcctctggccttcgggcctccaccgccccaggccccggccccaaggcgccgcgcaggtccctttgatgacgcggagcctgagccagaccagggggatccaggggcctgctgctccctgtgcgcccagaccatccaggtgaggtccccccgaggaatggatggctctagagtccagacgacttcggatccagctctttcttgagggaaacccactgacacgctttggccaccctatccccatctctaagatgctgatgctataggacttacggccattcctgagcaaagcaggccctgctcagggccttcaccatttccccttcaaagaaaaggttcttccctaggccatcagtactccgctgcactccagtgtggtcgacagagcatgaccctcttttttttttttttttttttgagatggagtctagctctgtcgcccaggctagagtgcagtggcgcgatctctgctcactgcaagctccgcctcctgggttcacgccattctcctgcctcagcctcccgagtagctgggactacaggcgcccgccaccacgcctggttaattttttgtatttttagtagagacggggtttcaccgtgttagccaggatggtctcgatgtcctagcctcgtgatccgcccgcctcagcctcccaaagtgctgggattacaggcatgagccaccgcgcccggccctttttttttttttagacagagtcttgctctgttgcggaggctggagtgcagtgatctcagctcactggaagctccgcctcctgggttcaagcgattctcctatctcaacctcccaagtgtgccaccacacctgccgaatgtttgtgtttttagtagggatggggttcgccatgttgggcaggctggtctcaaactcctgacctcaagtgatctgcccgcctcggcctcccagagtgctgggattataggcgtgagccaccatgcctggacatgaccctgtctctaaaacaatgtaatgaactgcagctcattcttgtgtgcacttttctgcaccccctttcccttaacacttactattgtctggcatgctacgtgttttcttgatctcattagcctctcccaccccaactgccacactgcactatcagagggcagcacttatcactgctgtagaacaaagtcctgcactgagccgatggcccagaaattttctttttatttatttatttattttttttttgagacagagtcttactctgtcgctcaggctggagtgtagtggcgcgatctcagctcactgcaacctctgcctcctggtttcaagcaattctccttcctcagcctccagagtagctgggattacacgcgcctgccaccgcgcctggctaatttttgtatttttagtagagatggggtttcaaccatgttggccaggctggtctcaaactcctgacctcaggtgatcctgcccacctaagcctcccaaaatgctggtattacaggcatgagccaccgtgcccggcctaaatatttaataaaataatggacgatgggtgccttctactgagctcccggtaattgtgagtgagtagaggacttgccctggggacattcagtgacctgctgggtgttgctgagctgtgaggaagttcaggtctggctgcagtggtgaggctgtgactcaatcaatcactgctgatgctcccaggacctgcaccagcttagtcctaggggcaaggattttaactgtccacctcagtttcttcatttgtaagatgcaaataacagtcacccctgcctcatgggatggagctgtgtaatgcccgcaacagtgcctgctgcatagaggggttgctgccagctgcctctccctccttgtctcttacctgcctgctgcctgggtcaggatgaagaggggcccttgtgttgcccccaccctggctgcctgctaagggcccatgtgatctgcctggcagaggagtttcttcaggaagaaccagggcagcttctgcccctagagggccaatgcccttggtgagtgcagtcccctggccccagcctggtccacctctgggaagagggtgcccagttgtgcaatccaggcccaggcagctgagccctcatctcagcatccagggcggatactggagggggcttgtggcatctgactctgtatctcctacctgcccctctccttggtagctgtgagaagtcactgctttggggagacctgatctggctgtgccagatggacactgagaaagaagtagaagactcagaattagaagaggtgagtgggctttggtggcgggctccctaccccactccctgccctgggctgcctgtgaccacactgcttgcctctgcaggcacactggacagacctgctggagacctgatcctcagtgtccttaccccctcctacctcttttctgtgccacctgctgtgggtccagcaggtttttacttgagtacaataaaaagtctgagtcaagggtgccttatggtggatgctgaggggaggggcggagctagtagcccaaggtcctgccagtcacggggcttcctcaggggcacagaggaggcaggaggggcccctggccctagcacgtgaacagcttctactctgcctggaaaccccatgcctcagctttcccctacttgcctctgagctcatgcaattcttggaagcctgggagacttaccttgaaattgaatgcaaataggacaaagaccaaggaggatggggggatgccctccttccacggggccctgtggcttccaagtcttaatctcctctagtctcttgtctacggagcctccttcaaacccagggaaagaaaagcacctgccagggttgtttttcttctaggatcttctattgatgctctgtgaggtcccccaggagccatgaagctagggctggctcctagggcaatgggactacagtgtccttgtcctttcttattctttctgttctttctttctttctttttttttttttttttttttttttgagacagagtctcactctgttgcccaggctggagtgcagtggtgtgatcttggctcactgaaacctccgcctcctgggttcaagtgattctcttgcctcagcctcctgagtagctaggattacaggtgcccgccatcatgcccagctaatttttgtatttttagtagagacagggtttcaccatgttggccagcttggtctcgaactcctgacctcaggtgatcctgctgcatcgacctcccaaagtactgggattacaggcgtgagccaccacgctcagcctctttcttgttctatatgtccatgctctgctccacttctgccccttcactctgcccccacacatcactccagactggccttgtggtcagagcctggaatgcctgggctgctgggggcctgtggactgcactgggccagaacccctgccgccttcaagactggcctgtagccagcaggtaggtgacttttcccaggccggcctatcccacctttcccctccactcactcacctcccttgcctgggtcaattagagaaagcttgtcggccaggcatggtggctcatgcctgtaatctcagcactttgggaggccgaggcgggcggatcatctgagctcaggagtttgagaccagcctggccaacatggcaaaaccccgtctctactaaaaatacaaaaattaaccggatgtggtggtgtgcacctgtaatcccagctactcgggaggctgaggcagaagaatcgcttgaacccaggagggggaggttacagtgagcggagatcgtgctactgcattgcagcctgggcgagagagcgagtctccatctcatataaaaaaaagaaaaagaaagaaagaaagcttgtctgttggcctgccctgcagggtggagttcagagggaaggtcaggagcctagtgacagctcaaaaaaaaaaaaacccaaataccaatgttggccccttttgcctttcattcatgtgttttctatacactaaactcacatattgggtttgcagatcactccaagcttggctggagctgtggtggtaaggagggtaatagagaagcttccccaccctcaaccccaccccttccttcctggagttcccagccctgactttagatccctcccacactggaccttcaaaaccctcagggcagagagcagccctacactccctacaccacacccatactcagcccctgcaggcaaggagagaacaggtcaggttcccgagagctcaggtgagtgacacgttggaatggcccagggcaccttcaccctgctcagcttgtggctccaacattctagaagccgaggcctctgccatccctgccctttcccatggatattccatttcaattagacaacccagcctggccggaatccccctgcgttccttcttttcctttgtgtatttttgagacagggtgttgctccgtcacccaggctggagtgtagtgggatcctggcccactgcagcctcaaattcctaggctgaggcaatcctgccgcctcagcctcctgagtagctggggttacaagagcaagccaccacacccagctaattttgaaaaatattttttgtagaggagaggtcttgctttgttgtccaggttggtctcaaactccagggctcaagggatcctttcccgttggcctcccaaggctctgggattacaggcgggagtcaccctgcctgggcccctccttttgatgagtcatcagttttcattcccgcacgaggctctagcccctggtaccagcttagttgctcaatgggctgtgtttgttctggagcccagatggactgtggccaggcaagtggatcacagacctggccggcctgggaggtttccacatgtgaggggcatgaggggggctcaaggaggggagcatcggggagaggagcgcactgggtggaggctgggggtcccagcaggaaatggtgagacaaagggcgctggctggcagggagacagcacaggcaggccctagagcttcctcagcacagctggactctcctggagaccttcacacaccctgatatctgggccccgcgctacgagggtgctttcactggtctgcactatgccccaggccctgggattttgaacagctctgcaggtgactgaaaggtgcggccaggctggggaacgacctggtttcagccccagccccgccactgactgactttgtgagtgcgggcaagtcactcagcctccctaggcctcagtgacttccctgaaagcaaaaactctgcaaaggggcagctgggtgctggctcacacctgtaatcccagcactttgggaggctgaggtagacaaatcacttgaggccaggagttctagaccagcctggccaacatggtgaaaccccatctctactaaagaaaaaaaaaaattagctgagcatggttgtacatgcttgtaatcccagctacttgggatgccgaggcgggaggattgcttgaacccaagaggtggagtttgcagtgagctgagattgtgccacactgcactccagcttgggtgagagtgagactccatctcaaaaaaaaaaaaaaaaagagagaatcccactttcttgctgttgtgatggtggtaagggaacgggcctggctctggcccctgatgcaggaacatggagctgatccaggacacctcccgcccgccactggagtacgtgaagggggtcccgctcatcaagtactttgcagaggcactggggcccctgcagagcttccaagcccgacctgatgacctgctcatcaacacctaccccaagtctggtaagtgaggagggccacccaccctctcccaggcggcagtccccaccttggtcagcaaggtcgtgccctcagcctgctcacctcctatctccctccctctccaggcaccacctgggtgagccagatactggacatgatctaccagggcggcgacctagagaagtgtaaccgggctcccatctacgtacgggtgcccttccttgaggtcaatgatccaggggaaccctcaggtgcatggctgggtcctgggggtaagggaagtggaggaagacagggctggggcttcagctcaccagaccttccctgacccactactcagggctggagactctgaaagacacaccgcccccacggctcatcaagtcacacctgcccctggctctgctccctcagactctgttggatcagaaggtcaaggtgaggccgggctcaatggttcacacctgtcatcccagtttgagactgaggagggaggatcccttgaaggcgagagatggagaccagcctgggcaacattgctgtagagatgacatcccatctctacaaaaataaaattaacaacctggtatggtggcatagactgttcccagttacttaggaggctcagcggggaggactgtttatgcaaataggaagctgcaatgagccctgatgatcctgctgctgcactccagcctgggcaacacagcaaaaccatctctacgaaaaaaaagttcccactgactggcaaggaaagccaggaaggggggctcaggtgccctctcagccatgtacctgttcttctggaagggcctcctcgcttctgccaggctcatcacatcttttttttttttgagacagagtcttgctctgtcaccctggctggagtgcagtggcatgatctcagctcactgcaacctccgcctccccagttcaagtgattctcctgcctcagcctcctgagtagctgggattacaggcgtgtgctaccacacccggctaatttttgtattctttttagtagagacggggtttcaccatgttggtcaagtggatctcaaactcttgaccttgtgatcctcctgcctcgacctcacaaagtgctggaattacaggcgtgagccaccgcgcctggccctttttttttttgagacagtttcactcttgttgccgaggctagagcgcaatcgtgtgatctcggttcactgcaaccaccgcctcctgggttcaagcaattctcctgcttcagcctcccaaggagctgggattacaggtacctgccaccacgcccggctaattttgtatttttagtagagatggggtttcaccatgttggtcaggctggtcttgaactcctgacctcaggtgatctggccaccttggcctcccaaagtgccgggattagaggcatgagccaccacgcccagccttcatcacatcttgagagaggacactgtctgcctcttgctctgatgagggtctgatgcaaggatagtgagtctctacagtgcacacttaagaaaggcagcatgtgggtgctcacaggtcagcggaggagggggagctggtggggaccaggcatgccttgctccagatcaggatatgatggcattggtgcagattatattagtatagaatatggtctcaggaaccaggcaggactttggcttccgagcagggttcagatcccagcttggccctacctgtgcagtgagatctcaagcaagtcagcctctaagcctcaggttcctcctttgccagttcaacagatgagctggcctggggtgggctgtgtggtgatggtgctggggctgggtcctctgcccctgcaggtggtctatgttgcccgaaacccaaaggacgtggcggtctcctactaccatttccaccgtatggaaaaggcgcaccctgagcctgggacctgggacagcttcctggaaaagttcatggctggagaaggtgggcttgactggaggaaggagggtgtgaagccgaggggtggtggctataacgtacagcaaccctgtgtcggtgccccctgcccgcttctctagtgtcctacgggtcctggtaccagcacgtgcaggagtggtgggagctgagccgcacccaccctgttctctacctcttctatgaagacatgaaggaggtgagaccgactgtgatgcttccccccatgtgacacctgggggcaggcacctcacagggacccaccaaggccacccagccccgtccctgggcggctcccacagcaagcccggattccccatcctacctccctggcccaggcccccccactgcagccccacctggcagcaggctcggcacagctttcatcttctgcacctgagtcagctgcatgggtggccacggatcagatacttagtcctattgcttatcctcaccaaagggtgtgccacccagggccacagtcatggaagaagaccatcccggtcctcacccataggcgccaagccctgttcatgatgggatcacagggcagagatcaattcattttactccagagactagggccccaggggttgaggctctttggggtttctaggggaagtggccagatcccctctgaggttagagagggggacccgttttgttttgctccactgaggagccctctgctgctcagaaccccaaaagggagattcaaaagatcctggagtttgtggggcgctccctgccagaggagaccatggacttcatggttcagcacacgtcgttcaaggagatgaagaagaaccctatgaccaactacaccaccgtcccccaggagctcatggaccacagcatctcccccttcatgaggaaaggtgggtgctggccagcacgggggtttggggcgggtgggagcagcagctgcagcctccccataggcacttggggcctcccctgggatgagactccagctttgctccctgccttcctcccccaggcatggctggggactggaagaccaccttcaccgtggcgcagaatgagcgcttcgatgcggactatgcggagaagatggcaggctgcagcctcagcttccgctctgagctgtgagaggggctcctggagtcactgcagagggagtgtgcgaatctaccctgaccaatgggctcaagaataaagtatgatttttgagtcaggcacagtggctcatgtctgcaatcccagcgatttgggaggttgagctggtaggatcacaataggccacgaatttgagaccagcctggtaaaatagtgagacctcatctctacaaagatgtaaaaaaattagccacatgtgctggcacttacctgtagtcccagctacttgggaagcagaggctggaggatcatttcagcccaggaggttgtggatacagtgagttatgacatgcccattcactacagcctggatgacaagcaagaccctccctccaaagaaaataaagctcaaaataaaatatgatttgtgttcatgtagagcctgtattggaaaggaagagaaactctgagctgaaagagtgaatgcccggtggggccacatatggtcacctctcccccagccttcagctccccaggtcaccatatctggggaggggagaagggtttggagaagtaaaacccaggagatgtgtggaggggggatgtctgtttaatcccagcacatcctctgctgtcctgccccaagatggtggaggacgtcgagtccgccgggcagcgtcactttttcttgggctccttagaagctaccaggtacctctgggccacactgagatgaggggagtagccgtctgcataggaggtgtcttcaaacaggatagaatagtcctcctggggctgtggggcaggtggacaggaagggcagagagcagccccggggctggtgtcactcacttgttggtggcatggctgtaactgaccacctcggccaggatccactgctcatccccatccacggccttcacccgggcagccaccttgtctccaggtctggccacgtagtctcctgaggcagggatggccccacagaggggtgggggcctgtgagtggaacaaaggatcagtcccagcccctgggcaccagccccttcctcgcagctgctgccctcacttgtcaccaggcttcccaatccacaggggcagggtcatggccgactgctgcagcagggtcatcagcacccctctgcgcatggtcttccggggtggctccaagtcattgtagagacccgcgatcttggccactgtgggaagaaagggaggcctgaggccccagggacaggggctggccctgaccccccagcatgctgaactgagctgctggaggagcacctgggagcccccagctcccgagtgagcccgagggcacagcaggactgtgacctgatctgccaggtgtcctacaggggctgctgcgctcaactacatatgggtgagacggcagcacaccaggcacccaggggaaggaaccagggagggacaaagcgggttctgaggtgctggtgaggttctcttcttgatgtcggtgctgacacagaagtgtgtttcgttagtgaaaagttcctaaaattcgaagggtcccgcgggaatcggggcgaggccgggtgcctcttcagcgtccagctgctctactgcctgaatccctggtacccgggccctgtctacgtggggctcactgtcaaccctgttcgtccagcagcacaatggtggccgcaaaaaaggcggggcttggcggaccattggccgaggtccctgttaagagggggagggtctctgtgcccggaggaaggctccctggaggaggcggaaccggggggcacaagcctgctgagagggacccactaggtctgtgacgtgcgcgggacgtcccgggcgaggcctgttggtggggggaggctgtcgcaggggaggagcctaacggggaggcggtgccctgggaatctcggcgttagaactccggagagcagctggctgaggcgagggtgatgatccaggctggggtccagcgcaggggtcttggggggcacgctggggtcgggtggagcgcaggagggagaggaatgagaacaggtgggtacctgggctggaggcgggacctgaggtgggcaggtgcagggggcgtgccttcaggcagttgcggggccagggctcggctgaagctgggagtgaggaccccgttctccggtgggataggaggggacccgcgatgctgggctgcgctggcggtagggcgcggcggggctcacaggaacattcctgttgtcctccccatggagattgtgctcgtcgtgcacggcttcccatccgccgcggccgcccttcgggtaaagaagaagaccgggcggcggcctgtggcctggatttggggtccgacccccgcccggagccgccttgactccaaccccgccgcggttggagggggcctggcacccccgccctgggcgctcctcccggtcccgttgcgccccgacctccgtcagccgcacggcactggccactgaccgtcgggcctcctccgccccagggcgccgcgcaggtccctttgctgacgccgagcctgagcctgagccggtcccggggtccaagagggctgtgtgcaccctgcgcgtccgcgcgctccaggggaggtgcgctccaggggaggtccgccccaagcagagcggcacatcctccagacgacttcggatcctgctgttgaggagccaggaaacgccctgacactgttgcggccctgtccacatctctaagatggggatggatgatagtacttctggccattcctgagcacagcaggacctgccttttccctttgactggaaggttcttctctacatcttcagtcttgataacctgccacctccacagggaggtcttccctggctcccaatttaaaattgcagctctgagaagccgggcatggtggcatatgcctgtagtcccagctacgggggaggctgaggtgggaggatcgcttgagcccaggagttggaggctgaagtgagctatgatcactccattgcactccagcctgggggaaacagcaagaccctgtctctaaaaaaataaaatacaataaaattgcggctctttcttgtgcacttccctgcccgcccccctttcctgaacccttattattttctgccatactacaaattttatgcatctcattaaaccccttccgaacctgtgtactaaactgcctgggggcagctctcatcactgctgtagaacaaagtcccacatagagccaatggccaagaaacagttaataaaataacagacgatggtcctggcctctactgtgagtgagtaaagggcttgccctgcagagattcagtgatctggcgggggttgctgagctatgaggaagttcagatctggctgcaggggtgaggctgtgactcagtcaatcactgcccatgctcacaggacactggccagcttagtccctgggggcaaggattttacccccccccccccacctccatttcctcatctctaagatgtgaataatcgtcgcccctgcctcacaggattgagctgtgtaacccccctcccaccttttttctatgccatccactgcgggtctggggctttttactggaatgcaatacaaagtctgagtcaagggtgccttctgttggttgctgagggcggaggcagagctagttgcctgtggtcctgccagtcaaggggcttccagaggagggaggaggggcctgtggccctagcatgtgagcagcttctcctctgcctggaagccggacgcctcagcttctcccacactcccacctgcccgcttgcctctgaattcacacaattcttggaaggcttgggagactcacctttactcaaatggttacctgtctcgtgtctcgtgcccagcttgaccttttttttttttttttttttttttttgagttggagtcttgctgcgtcacccaggctagagtgcagtggcgtgatctcagctcactgcaatctccgcctcccgggttcaagcaattctcctgcctcagcctccccagtagctgggattacaggtgcccaccaccgtgcctggctaattttcgtatttttagtagagacagggtttcaccatgttggccaagctggtcttgaactcctgacctcgtgatctgcccaccttggcctcccaaagtgctgggattacaggcgtgagccaccatgcctggccccagcttgaccttgaactttaaatagtgaagacaaagaatgaggagggtggggggatgccctccttccacagggccctgtggcttccaagcctcaacctcctctggtctcttgtctgtggagcctccttcaaacccagggaaacaaaagcacctgccacgggctgctgtttttctaggatcttctagcgaagctctgtaacttcccctgagagccatgaaactgggctggctcccagggtgatgggactccagcgtctttgttctttcttgttctatgcatccatgctctgctccaccgctgccccttcaactctgcccacacatattactccagactggccctgtggtcagagcctggaatgcctgggctgctgggggcttgcatgcaggctgcactggactagaagcattggcgccttcaagactgccctgggaaacatgacctgccctgtttctgtctagtgagtacccatttttccccactcaccggctcacttcccttggctgggtcaattagaaaaagctcttctgttggcctgccctgcagggtggagttcagagggcagctcaagagcccggtgacagctcaaaaaataaaaaaagccgccaggagcagtggctaatgcctgtaatcccagcactttgggaggccgaggcaggcggatcacctgaggtcaggtgttcaagaccagcctgaccaacatggtgaaaccccgcctctactaaaaatacaaaaattagccgggtgtggtggcggatgcctgtaatcccagctactcaagaggctgaggcaggagaattgcttgaacccaggaggtggaggttacagtgagccgagatcctgccactgtactccagcctgggcgacagatcacgactccatctcaaaataaataaataaataaattatacattgggctcttttgccttttattcttgtgctttctaatcacaactaaacactaaactcacatcttggctttgcagatcactctaagcttggctgcagctgtggtgctgaggaggctaatagagaagctccctcgctctcaaccccaccccttccttccgggagcaaacccaagtctggtcccgactccggatccctcccacattagacctaccacaccctcagggcagacaacagctccacacaccccacactcagccaccagggcaagggagcaaaattccagaaagctcaggtgagtaccagagtggaatggcccagggcgccctcaccctgctcagcttttggagccaacattccagcagccaaggcctctgccatactggctgtttccccacggatatccagtttcactaggggaactccagcctggcttcccttctttcttttttatttttgtttttttgagacaaggcttggctctgacacccaggctggagtgcagtggccaaattgtagctcactgcagcctcaaaatcatgggctcacatgataatcacgcctcagcttccctggtagctgggtgtacaggagagagccaccatgcccagctaattttttaaacttatttttaatttattttttatttttttgagacggagttttgctcgtgttgcccaggctggagtgcaatggcatgatacagctcactgcaacctccgcctcctgggttcaagcgactctcctgccttagtctcccaaggagctgggattagaggcatgcgctatcacaccctgctaattttgtatttttcatagagaaggggtttctccatgttggtcaggctggtcttgaactcccgacctcaggtgatccgccccaccttggcctcccaaaatgctgcgattacaggtgtgagccaccacacctggctgcccagctcagttttaaatattttttttctagagatggggtcttgctgtattgcccaggttggtctcaaagtccaaggctcaagtgattcttccccactgggcctccaaagctctgggattacaggcatgagccatggtgtcccctcctcattctgcggaatcatcagagttttgttcattcccacaccaggctctggcccccagtaccagctcagttgctcaatggaccatgcttgtcctggagcccagatggactgtggctgggcaggtggatcacaggcctggccggcctgggaggtttccacatgtgaggggcctgaggggctcaaggaggggagcatcggggagaggagcccactgggtggaggctgggggtcacagcagaaaatggtgagacaaagggtgctggctggcagggagacagcacaggcaggccctagagcttcctctgtgggcggcaagccacccaggcaccgaggcaagagacagaggacacgatctgttccagtataataaaatataaaacaagaatagttataccagatatagatcttagatatgattatatatgaatatcattaatcattagtttgtagcaattactttttcttccaatattataataatccttgctctataatcatagcctaggaaaaaccaggccatacagagacaggagctgaagggacatagtgaggtgtgactgcaagacaggagtgcgagccttctgttatgcccggacagggccaccagagggctccttggtctagcggtgacgccagcgtctgggaagacgcccgttaccaggcggatcgtggtccagcggtagcaaaaggtgtcaagaaacaacacccgctactcagcagaccaggaaaggggggtctccctttccctgggggagtttagagaagactctgctcctccacctcttgtggagggcctgacattagtcaggctcgcccgcagttatccggaggcctaaccgtctccctgtgatgctgtgcttcagtggtcacactcctagtccaccttcatgttccatcctgtacacctggctctgccttctagatagcagtggtaaattagtgaaaatactaatagtccctgatatgcagaaataatggcataagctgtctttctctttgtctcctctccctctctgcctcggctgccaggcagggaagggccccctgtccggtggacacatgacccacgtgaccttacctatcattggaggtgactcacattctttaccctgccccttctgccttgtatccaataaataacagcgcagcccgacattcggggccactaccagtctctgcacattggtggtagtggtcccccgggcccagttgccttttctcttgtctctttgtcttgtgtctttatttctacactctctcattgccgcacttagggagagacccaccgaccctgtggggctggtccctacagagaatgacttgaacctgggaggcagagattgtagtgaggtgagattgcaccactgcactccagcttgggtgacagagcaagactctgtctcaaaaaaaagatgaggtgagttcagtttgggaaatgttgaatgccagatgcctttggcctattcagagggagattgccgaagcacagaggagagttcatgacagggtttaattatttttagtgctctcatgtcccagattcggccaattggagtccctccacgctggttcctgtgtcctgtgacatcacccatcttctttctccttttcttctttcataagccacttccttcctggcatgacagtgtgttccaggaccatcttgtaccttgcacctgccctgccctggccctagaatcagccaattctctgaggcatcctgattcctttttgtgggggaacggtttgagaacaaaatatactactacatgatactatattctgacaggaaaaaacacagccataagaaataaagccatggccgggcacagtggctcctgtaatcctaacactttgggaggctgaggcaggaggattgcttggggccaggagttcaagaccaacctggcccacatagtgagccctcatctctattaagaaaaaaaaaaaagaaagaaggaaagccatatttggatgagtttagtcttctgattatttttgctgaagttttaaattattattattattattttttgagacagagtctcgttctgttgcccgggttggggtgcaatggtgcagtctcagctcactgcaacctctgcctcccaggttcaagcaattctcctgcctcagcctcttgagtagctgggattacagattcctgccatcacgccctgctaatttttgtatttttgttagagatggggtttctcaatgttggtcaggctggtctcaaactcccgacttcaggtgatccggctgccttggcctcccaaagtgctgggattacaggggtatattttatatttaaagtatatttaaaaattaagggccaggctcagtgtctcacgcctgtaatcccagcactttgggaggccgaggtggctggatcccatgaactcgggaatttgaaaggcacaagagcgaaactccgtctcaaaaatatatgtaaaatatattttatggccaggcatggtggctcacaaccgtaatcccagcaccttgggaggccgaggtgggcagatcacctgaggtcaggagttcaagaccagcctggccaatatcgtgaaacgctgtctctactaaaaatacaaaaaattaactgggcgtggtcgtgtgcacctgtaatcccagctgctcagaggctgaggcaggacaatcccttgaacccgggaagtggaggttgcagtgagccgagatcgcaccattgcactccagcctgggcaacaagagcgaaactccacctcaaaaacaaaacaaaataaaacaaaacaaaacaaaacaaaatatatgtatatacacacacacattatatgtaatatctacttttaaatataaacataaatattataaagcttttattgcaattgttcattttagaaacttcagaaaatacaaattagtaaaaagaagaaaataagtctgtaataccacttttaagaactattttaaaaacctctagcttttttttgagatataatttacataccaagacttttttaaaaaaaaaaattcataatggtgacttttttatcggactgtatagaataaagcttgttaaaatgtctaagatattttgtaatatatgaaaatttcagctaaacttgtgctatagcatcccatggtttgaatatattattgaaaatcattccataaacaatggtttggtatatagttttaacaattcaaggctgggcacaatggctcacgcctgtaatcccaccactttgggaggaggaggcaggcaaatcacctgaggtcaggacttcaagaccagcctggccaacatggtgaaaccctgtctctaataaaaatacaaaaattagccgagcatggtggcaggtgcctgtgatcccagctactgaggaggctgaggcaggagaatcacttgaacctaggaggcagaggttgcagtgagccgagatcttgccactgcactccagcttaggcgacagaatgagactccatctcaaacaaaataaataaataaaataattcagcaggatgaggtggctcatgcctataaccccagcactttgggaggctgcggtgggactattgcttttgcctgggagttcaagaccagcctgggcaacatagagataccatgtctcagaaaatatatatataattaattttaaaaaagagaattcattgatgattctgtatttacaaatatattcctgcatcatttgttcatggtaaccaggaaattgcaatgcataaatacatgctgtcatttccaaagcggctctcttccagaattggtactgattctagtagacttttcattctgatgttaaaaatataattaatagaaatgtcttgtacctaatagcttttttccccacaactccccaaccccctcactctagaggccttagtagtctaatttaatcagcttagtctgaaatataatactaccttggcatcttgttggcctagtatttcttactcttttatggaatgaactgtgcaattgttttgtgtggctaaaaggtattctaggtcgagtatagtggctcacacctgtaatcccagcgctttgggatgccgaggtgggcggatcacctgaggtcgggagttcgagaccagcctggccaacatgttgaaaacccgtctctactaaaaatacaaaatttagccaggtgaggtggtgtgcatctgtcatcgcagatactcaggaggcagaggcacgacaattgcttgaacccaggaggcagaggttacggtgagctaagattgcatcactgcactccagtctgggcaacagagtgagaccctgtctcaaaaaataaaaaacaaaataaataaataaaaaataaaaggcattctaattaagttgttgcttttttttttttttttaattccagagcggactgatgtactggcccttagtacaggtgagttccgcctgctcagtaatatgaactcagggctttggtttccatgtggccctaatggactcactctccctgttccagctaaccaacttcagccttgttcctgttcaatggagaacagcttacgctggagtctgtggttttctctgggccaccttcatctgtttttcccagcagagcggtgacggcacattcaagtcagctttcaccattttatatacaaaggggaccagtgccacagaagggtccccggagaaatgagaagtcaaggactctcttaaagggaccacattttgacctaaaatgcacagaattgcctgcagacaaaatatttgatgtgccaattatgcacttcattttgaggaattactactatttatagacccacttttaaaaaaattatcaatgattattttttaattgtattcagacattttttcctgatctagtctgaaatattacttctctaatattttggttaatatgaataacagtggcaaaatggcattttagaattattaatatttctaatattttaatgcaagtttcaggaaacttggtttcttggttttgattgtttacatttctattctaaaatctcaggttatctcctgaacacttttggacagatgaagttttacaccaaaaaatagttcttagagtgaattttaatttacatagaactcaatcgaaatgaagatttaataaccagatttctttccccaaaacatacataatttgttattttgatactaaaatttagtaaatacctttttttttttttttttgagatggagtctggctctgtcacccaggctggagtgcagtggtgccatcttggctctctgcaacctctgcctcctgggttcaagcgattctcctgcctcagcctcccaagtagctaggactacagtcgcccagcaccacgcccagctaactggtggtggtagagacagggttttaccatgttggccaggctggtctccagctcctgacctcgtgatccgccctcctcagcctccgaaagtgctgggattacagcagtcagccactgcgtcctgcccccaaatttgctttgcatggagaaaactctaacaagtcctcttgaacacagttttctgataacccagatcaatgaactacccaggcttcaccactatgcgatataggcatgtgagaaactcgtacttataccccctcaatacattaaaactaaatatatatatatatatatttttaaatcaatgggccaggtgcagtggctcacgcctgtaatctcagcactttgggaggccaaggcgggtggatcacttgcggtcaggagttccagatcagcctggccagcccgcctctactaaaaatacaaaaattagccaggcgtggtggtgcatgtctcccaccacggctgggaggtgtgcccaacagctcattgagaacgggccatgatgacagtggcggttttgtggaatagaaaggggggaaaggtggggaaaagattgagaaatcggatggttgccgtgtctgtgtagaaggaagtagacatgggagacttttcattttgttctgtagtaagaaaaattcttctgccttgggatcctgttgatctgtgaccttaccctccctccactattgtcctatgaccctgccaaatccacctctgcgagaaacacccaagaatgatcaataaaaaaaaaaaagagttctggagatcagtaaaaaaaaaaaagaaacagggtttctccatgttggtcaggctggtctggaactcctgacttcaggtgatctgcccactttggcctcccaaagtgctgggattacaggcatgagccactgtgcctggccccaaatgtgttttacattttcttcctatttgattcatctttgtcctgcaacataaatatgctacttttctaccgataaaaagacaaaatggaatttaaatctggcctggacttctcaaaaaagtcagtgtgatgaaaacatgttctagataaaacagaaatgagactgggcatggtggctcatgcctggaatcccagcgccttcggaggccaaggcaggagaatcacttgaggccaggagtttgtgaacagcctgggcaacatagtgagaccccagatctactaaaaatttaaaaattagctgggcatggtggtgcatgcccatatgtctggaggctgaggcaggaggatcgcttgagcccaggatttggaggctgcagtgagctatgattgtgccactgcactccagtgtgggtgacagagtgagaccctgtctctaaaaaaaaaaaagagagacaagatgatcaggatgagcgcagtggctcacgcctataatcccagcactttgggaggccaaaccaggtggatcatatgaggtcaggagttcgagaccagcctggcctagatggtgaaaccccgtttctactaaaaatacaaaaatcagctgggtgtggtggcgcacacctgtgatcccagctactcgggaggctgaggcgggacaattgcttgaacctgggaggcagaagttgctgtgagcaagattacaccactgtgctccagcctgggcaacaggaatgagactctgtctcaaaaaaaaaaaaaggggggatgatcaaacacaatgcatcaacctcccggagccatataaaccctaaccctaacccaggaagcaggcaagcctgtgtgtgagtttccactctattgctggtaccactcggctctggcaacccggaaggccaccttcccctgttgttactgtgtaaggaggaaggagcactggtttgcaagtcagaagcctgggttgaagcctctgctcgggttcctgctggctgtgggaatgtggggttacctttcctggctggcctcgtttccttcatgtccaatgcaggggttccagtcacatgcattgggcaccattacatgtccaagctgtgccaggatctagaaaaatggctggactcaggccaaggggccttcctgtctggcagtgaaaataagaggagataccaagggccctgagtctggaggggaagtcatgagcacagggcagtgccagggcccgggagctgccacagaggagcccaccttggtgacagacacctgtaggcacatccgtgatgcccagtgcccaacacagggaactggacaaacgtttcatgcacgactcttttttcccttcttggctaccttgaggaccttgattataatagttatcctttttttctttttctttttttgagactcttgctctgtcgtccaggttggaatgcagtggcaaaatcttggctcactgcaatcttcacctctcaggttcaagtgactctccttcctcagcctccctagtagctgggattaccggtgtgcaccactaggctcagctaatttttgtatttttactacagatggggtttcaccatgttggccaggctgatcttgaactgctgacctcaggtgatctgcccacctgggcctcccaaagtcttgggattacaggtgtgagccactgagcccagccggattataatagccttttcatgcaccaggggctttatactcattatctcatttcattcatatgagttgaagtcagcttaccccccatttcacagatgaggaaaccaaggcccagagaggttaggaattcgtccaaggtcacacagctaggaagtaggattcaaacccagacagccaggctgtaacacctaggctcttctcaggctcatgcccttcccaggggtctgggaagccctgacctgcagcctgtcaccttcgtttaccccccagcctccaggatattatgtgtgcaccggcgtgggatcctggaactggcaggaattgtgggttgtgttagtccctagactcccatcgcctatatgaaatatggttccttttgtggcttgggaggccatggccagccctgcgatgccattgactggtgagtgcatgcctgggaccaggctacaaaatccctcacactctggggtagtcaaggcttatgaggaagtacccaaaactgaagctggggtttggtccagggagatcccagtgtgcagtactactttgcaggcaggcagaggcctcttggataacatggccagtgaagccagatcttggtaccagctgccccttaccctggccatgggctgaaaacgttgccttaaaaaattggccaggagcggtggctaactcctgtaatcccagcactttgggaggccgaggtgggcagatcacttgaggtcaggagttcaagaccagcctggccaatatggtgaaaccccatctctactaaaaatgcaaaaattagctgtgtgtggtggcaggcgtctgtaatctcagctactggggagactgaggcaggagaattgcttgaacccgggaggtggagtttgcagtgagttgagattgcaccgctgtattccaacctggacaacagtgccaaaccctgtctcaaaagaaaaaaataataataatataaagtggccaggtgtgttgactcatgcctgtaatcccaccactttgggtcgaggcaggaggatcactggagcccaggagtttgaaacgagcctaggcaacagagtgagaccctgtctctatattaaacacacacacacacacacacacacacacacacacacacacacacacacacacacacacacacacaaaggcagccagactatgcactaggaactgccctgggaatctctttgtgttctcacaacaatcccatttcacagatgaagaaacctaggcacagaaatattcagtaacgtgtccaggtgcggtggctcacgcctgtaatcccagtactttgggaggctgaggcaggcagatcatgaggtcaggagttcgagaccatcctggccaacatggtgaaaccccgtctctactaaaaatacaaaaattagctgtgtgtggtggcaggtgcctgtaattccagctactcaggaagctgaggcaggagaattgcttgaacccgggaggcagaggttgcaatgaaccgagatcacaccactgcactccagcctgggtgacagagcaaaactccgtctgaaaaaaaaaaaaaaaaaaaaagaaatattaagtaacttgtctgaggccacttagttaccaagacgtgggagctgggacttgaacccaggcagtctggctggattcatgcctgcagcctctgcactcctgctacttactgtgtgagaagcgcctgttctgtggaaggttgtgggctgagatctttccatgagttccactcatttacccccaaggctgttcttaaagacgggcatgacagttatgcccattttacagatggggccctgaggctcacaggggcatgccactcacccatttccacaaagctatagttagttagcagagggcagaattcggccgcctctcccctagcttgaaggctgtgattgacacagaggtttttttgttgttgctgttgtttgttcctttttcttttttttgagacagggtcttgctctgtcatcccagctggagtgcagtggtgcgatgtcagctcactgcaaactctgcctccaagatgcaaatgattctcgtgcctcagcctcccaagtagctggaattacaggtgtgcactaccacgcccagctgttttttgtagagatggggttagtagagatttgttttatagagacggggtttcaccatggtctctactaaaccctgtctctactaaaaatacaaaaattacccaggcgtggtggcacatgcctgtagtcccagctactcaagaggctgaggcaggagaatcacttgaacctgggaggtggaggttgcagtgacccaaaatcatgcactctagcctggggtctcgcttttgcccaggttagagtgcagtggcacaatcatagtggctcactgcagcctcaaactcctgggctgaagggaatcctcccacgtcagcctcccaagtagctaggactataggcatgtgccatcatggcgagttaattttttgtgtgtttttattgtcttgagacagagtcttgctctgttgctcaggctggactgcagtggcatgatcttggctcaccgcaacctccacctcctgggttcaagcaattctcctacctcagcctcccgagtagctgggattacatgtgtgtgccaccatgcctggctaattttgtatttttagtagagacagggtttcgccatgttggtcaggctgctctcgaactcctgacctcgtgatccacctgcctcggcctctcaaagtgttgggattacaggcatgagccactgagcctggcctggtgagctaatttttaaatttgttatagagacaagagtctctcttatgttgcccaggctggtctcgaccccctggcctcaagtgatcctcccacctcagcctcccaaagtgctgggattacagatgggtgtcaccgcacctggcctccgaggaggatttcattataaacctgccctgaagggagggaatccaattttacgagagggtgtagcctggtgaggcctggatgacctccggaggcaggggcttgtgcctgggctgaggcctaagggacaatgggcagacatgaagttgccccaggcagagggtacagtgtgggcaaagtcaggaagtggcagggcttggatcactccaggaagagagaggagtcatgtgtcacaggagctcgagacccagagagtgaggcaggcaggcagggaccaagcttgggcacagccaggaaggcaggacagggcatggtggggccaatggaatcattacccaagacgggcattttcagggaaacagcttagataaggccaggcgtacagtagctcccacctgtaatcccagcatttggggaggctgaggtaggaggactgcttgagcctgggagttcaagaccagcctaggcaacatagaccccatatccacaaaaaatttaaaaaaggagtttgtgttcctgtagtagcatacttgggaagttgaggtggcagtatcacttgagcccgggagttcaaggctaaagtgagctgattgagccattgcaccccagcctgagcgacagagagatatgctgtctcaaaggaaatacaaattaaaaaaccagccgggcatgctggcgtgtgcctgtagtctcagctacttgggacactgaagtgggaggatcgcttgagcccaggagttcaaggctgccgtgagctatgattgtgcctctgcagtccagcctgggcgactgcagactgcaggacttttttaaagaccctgtctcttaaaaaaaaaaaaatcttagataagaggatgctgtgcctccctgggggtcttcagtcacccatggtcctggcaagagaggagggccaggagagagcttcacccacctgctgtcctgcccgtgtgacatccgcaggtgctgccatggccacgactgttgttacactcgagctgaggaggccggctgcagccccaagacagagcgctactcctggcagtgcgtcaatcagagcgtcctgtgcgatgagtccccagcagcaccatgccacccaccccgagtatcccctgggcaccctggcatagccagatgacttccgtgcccctgttgcaataaccactgcttccaagtctctgtagaccaccccttgggtatatctaatgtaagtgatatttattttatttatattttttgagtcagagtctcactctgtcacccaggctagagtgtgctgacgtgatcttggctcactacaacctctgcctcctgggttcaagcgattctcatgcctcagcctcccaagtggctaggactacagacatgcaccatcacgcccagctaatttttgtatttttttcagtagaggtggggtttcaccaagttggccgggctggtctcaaactccccacctcaagtgctctgcccgcctcggcctcccaaagtgctgggattacaggcatgagccatggtgtctggccctaatgtgagtgatctttaacactgagcacttgaaaaagaaaaccctgaagaaacctaattattcgatgtctggacgacaaggaagaagatagaaatggcatcagataataaacagtgtaaatgtttgtttatcagaaaggggctggtggtcgggacaagtaggaggatcgcttgagtccaggagtgcatctctacaaaaaagttaaaggattttttaacattggccaggcgtggtggcacacatctgtgatcccagctacttgggaggctgaggcaggaggattgcttgaagcccaggaggttgaggctgcagtgagctgtgatcgagccactgcactccagcctgggtgacacagcaaaatccagtctcaaaaaaaataataataatattttacataaccaaccacttctaaagattaaaaaaaaacccctatgattaaaaacctcaggtccctcaggcaatcataccagatatcgaaacaaagcaataacataaggactgcagtatttattttatttttatattatttatttattctttgttagtttttggagtgtgggttttgttttgttttttgaattttttattttgttctactcggttttattcttattgctcaggcttgagtgcactggcctcttctcagctcaacctccgcctcttgggttcgggtaatgatggttccacgtcagcggccctccgcctcttgggtttgcgtgacggttccacgtcaccgaccctccgcctcttgggttcgggtgatgatggttccacgtcagcggccctccgcctcttgggtttgcgtgacggttccacatcaccgaccctccgcctcttgggttcgggtgatgatggttccacgtcagcggccctccgcctcttgggtttgcgtgacggttccacgtcaccgaccctccgcctcttgggttcgggaggtggttccatctcagccgccctctgcctcttgggtttgcgtggtttttctgcctcagcctcctgagtagctaagggaggtgtcttgagattatcatcggctgagggtggaagcggcccccgcagacgctcggcaggtgtcttgatattatcatctgctgagggtggagctgagggtggaaggggagtgagctgacgctcagaaggtgtcttgagattatcatccgctgagggtggaagcggcccccgcagacgctcggcaggtgtcttgatattatcatctgctgagggtggagctgagggtggaaggggagtgagctgacgctcggaaggtgtcttgagattatcatccgctgagggtggaagcggcccccgcagacgctcggcaggtgtcttgatattatcatctgctgagggtggagctgagggtggaaggggagtgagctgacgctcggaaggtgtcttgagattatcatccgctgagggtggaagcggcccccgcagacgctccccgcagacgctcggcaggtgtcttgatattatcatctgctgagggtggagctgagggtggaaggggagtgagctgacgctcggaaggtgtcttgagattatcatccgctgagggtggaagcggcccccgcagacgctcggcaggtgtcttgatattatcatctgctgagggtggagctgagggtggaaggggagtgagctgacgctcggaaggtgtcttgagattatcatccgctgagggtggaagcggcccccgcagacgctcggcaggtgtcttgatattatcatctgctgagggtggagctgagggtggaaggggagtgagctgacgctcggaaggtgtcttgagattatcatccgctgagggtggaagcggcccccgcagacgctcggcaggtgtcttgatattatcatctgctgagggtggagctgagggtggaaggggagtgagctgacgctcggaaggtgtcttgagattatcatcggctgatggtggaagcggaatccgcagacgctcagcaggtatcttgatattatcatctgctgagagtggagctgagggtggaaggggagtgagctgacgctcggaaggtgtcttgagattatcatccgctgagggtggaaggcaggtgtcttgatattatcatctgctgagggtggagctgagggtggaaggggagtgagctgacgctcggaaggtgtcttgagattatcatccgctgagggtggaagcggcccccgcagacgctcggcaggtgtcttgatattatcatctgctgagggtggagctgagggtggaaggggagtgagctgacgctcggaaggtgtcttgagattatcatccgctgagggtggaaggggatggagcagacactcggcacgtgtcttgagattatcatccgctgagggtggagctgagggtggagctgagggtggaaggggagtgagcagacactcgggaggtgtcttgagattatcatccgctgagggtggaaggggagtgagcagacactcgggaggtgtcttgagattatcatccgctgagggtggaaggggagtgagcagacactcaggaggtgtcttgagattatcatccgctgagggtggaaggggagtgagcacacactcgggaggtgtcttgagattatcatccgctgagggtggaaggggagtgagcacacactcgggaggtgtcttgaggctcagggagttatcagttatagaatgttgttgagttggaggaggtggctggtggcccatcctgttttttaaagtttcagctgtgaggtagggccagtagggcaatcctgaagaatgacgatgctccgctgccgccattctgacctgtagggccaaaggagggaatgttttcacacatattcatttgatggacaaaattaccgccaccaacacagtctgcaccttctgttgctggtgatagatttttgcacctttccatcctccaggtttcaaaatagcagtatcagtgtcataatatcacccttccactgagtactgccgacagctggagggtaaaggaaagtcattgggacacactgttgtctccacatgccactgtgtctgtctgcaaatgtaggcaggctggggtcctgccccagggaagacagagtcataacagagtaataaagaagcatgtttgagacacaggagtgtctatgtctatcctcattcctccctcacagccatcaccagagcatgtttcttgcaccaggtcaacagacagtaagagacagtaagagaggcatgaaaagcccactgtccacacatgttgcagcttctttttggagaatgttttccaggccttttatgttctgtctctgactctcagaactctgcaaggtcagtgtgaccaccctgctccaaatctaagaaaacagaggtttccagaggaaggagaaattgtgcccagggtcacacagcttgcaagaggcagagtggaagttgattccagctctgcctgcaggaccctctcatttcccctctgtttcccttcttgacaaaggatcttcttcactctggaggtgccacccatgagaacaaagagctctggagagatgtggattcctgaagagctgcaggggaactgggagagggttttctgacagaacaatctcacctcaagaagtcacttaggcatggctgtaatatttcttttcactcccaggtaataccaaattgtaagtgcactaggacataaagaatacttttgtccatggaaaaatgaggtgggaattctaaacaaagcaagttttaaaactgtgtttcacttcaagtgtacaagtcccatcacgtgtaatcataggactcggcagcttttgaaggtacagaggccacacaagaaccagcttagctgagcatcatttaaggccttcatttggaattgtccctgtgggtaataagttacattcactcttcactagtttacagtcagggcccatctgctattacaaatacggaacctctgacacttagaatattagatcaggggccccactgggtggggatgaaggtgtttttgcacaacacggttaccaacagggatgggactgtgatgcttgtaggcagcctttctctctgccatctccctctgcagggcttgagcacagagctgtagggagaaaaatgtatccatgtcctgacctggcagactatgtccaaaagcaaggaaaacaagcaaacttacccagttgcaaagagcctttcttgcagaaggggggatctgaaaaagccaacacatgagaaattgaatgttgagagagtctaagggccgtggcatcatctgcatcagcactgaactatcctgcaactgcagggaggaagctccttactttgcatttgtggtagtcctctgcccgccgccgcaactcttgcgcacgttgaaacattttcctatggattacaatcactttcatcagataaagcaccactttcaggatgattttaaataatctgccatgtttctgttatcctcacaactgtacccttacacaatctatctctacctagaaaacgtatttcagatggctataagagtacagtctgagccggtcacggtggctgacgcctgtaatcccagcactctgggagggcggggcagatggatcacgaggtcaggagattgagaccattgtggctaatatggtgaaaccccttctctactaaaaatacaaaaaattagccaggcgtggtggcaggcacctgtaatcccagctactcgggaggctgaggcaggggaatcacttgaacctgggaggcggaggttgcagtgagccaagatcacgtcattgcactccagcctgggtgacacagcgagactccatctcagaaaaacaaaaacaaaaaaactgtacagtctgatccaaactgttgctgtattgattcctcctcttgcttactgcctgctgacttctgagatgatagtttccttccccattctcagtacatccctaattcatccttcattgagcatcttttatcataaagctgtattctctttgtattaatatccttaccgtgtttcacagggcagaaacagctgggcttataaacaggcatagtccttttgaaggatgtggttgatcctacaacaacacactttcctaaggatgacaacaactcaccccacccctagaatggctggtatgaaccgagtttccacacagtctagctggcaatggggtcaggagacgttttgctacttcacatcttttggtcactggtaaatattaaggtactttgttttctgttttgtgaactctctctcgctctctctcacgatatgtcttctgaccgtttgtttctatttctgcatttactgggtctaaatactgtacaaaggttaaaaacaacactccaatgggcgtttcccaggagggtggggttcagtttctgaactcacttgtaggtgtgtatttctttcatatccaatttcccattttcctctgcctctgatacctgcctctccttttctgcatgctcacattctttcacgcttagtttcctcagattagaagggagagaaatgcacacacatgatccaccagcccgtgtgggattccctctgcccttctggcatctgaaggctgtgattcaaagatcccccctgcaaccttcccacaaatgaaccaactgattctcacaaccgaagggagaattgacacctcccattgagggacaaaaaaaagtcacactctggcctgctggcaagtcacctgtcatttccagctcatcttcatagttccatagttagtcctattctttagtaaatataaagactattaaaagcttctatgaggtgcactatgtgtgtctctggggtcagtcttgtgcttgacacagcgaaagctcattttagttcagtgtgaaaaaccagacctcaccaattcatcacaactaactccatcggaagcagaggattgctcctcatctgactcctcctgtgtgagacctgattctcagtcagaggctgatgccggaactgagaccatcagccatagagagatccttccagaataaccccgcagttcactactgcactttgccatgattcaggactggaactcttgtcatcgactttaaagatcctggttgagagaaaaggcaatctgaatgctgggcgcatctattgaattagaaatgatcggaatggctcctaagtcagggtgttatgtcctgaaaataggtgacaacggcaaaccatccaccctggtgttgactgactttaacaaggttcagttcacagagattgagggcagaaaaaggaaacggcctaaaaagggtaagtttgctgtgttgccctcactccacttgattcatggtcctgatcctaaggatctcacctgatacttggttttataggaaggatgtgtaaaattcccagaacgctaggaaacaggggcgaaaacacttcaaagagaaagttaatgaacttgtttctgaccacaaggcatccttcagcacatgctgtctggagtggcctcaaacaaggagtgtgtggtgtggtgctgagaatgcaatgggagcagggtcctgtccccacgctaaagaagctcacagcttaatgcaaatgagaagccagtgaggacatcactactcctgctgtgcacttgggaactagaaacacaaaacctgactctggagggaagctaaggaagcattctactcttgagttgacataagtgcatctgaagcttctgatctccgatgagaacaatgggggacaccaaacagaatataaaacccatgattgaatacatcaaattgctaacatggcagtaaacagacatgaggtgaagatggagaagaaggaaacccaggacgaaagtcagcctcgcatttggaacccatttccctgagtttcattgctgaattccagaaggaactactgagatgcaaagaagcacagcagcttttgcacacatgcgtgggattagatggaaaacaagtggattgagggtctgccaatgaaagcgacccgtactgaagtccactggctctggttgagacccagaagagtcatgcatcagaataaaggtggacaggaaataccctggcctttgtagggactgagcctgcaccgacgacttcaattgcagcctgtatggaggacccctgaccatcccccagaagtagactcccatctcttctgcagcaagataacatgctactaggcctcaattcattgctaaacattttttaacaagtatctcacatttaacaaaaaaagatcagtcatatggcagcaaaatacaatgtcatatgaccaaaacatgaaagactgtgaaaatgaatctggaggtgacccaagcattgaattcaacaatccaggctgggtgcggtggctcacactgggaggctgaggtaggcagatcacctgaggtcaggagttcaagactagcctggccaacatggtgaacccgtctctactaaaaatacaaaaattgggccgggcacggtggctcacgcctgtaatcccagcacattgggaggccgaggtgtgcggatcatgtcaggagttctagaccagcttggccaatatggtgaaaccccgcctctactaaaaatacaaaaattatccgggcatggtggcatatgcctgtagtcccagctactcaagaggctgagggataagaatcgcttgaacctgggaggtggaggttgcagtgagccaagatcatgccactgcactctagcctgggtgacagagtgagactctgtctcaaaaaaaaaaaaaaaaaaaaaaattggtcaaatgtggtggcacacacctgtaatccaagctactcgggaagctgaggcagaattgcttcaaactgggaggcagaggttgcagtgagccaagattgcaccatagcactccagcctgggcgacagagcgagactctatctcaaaattaaaaaaaaaaaaaaaaaaaaaaaaggctggctgtggtggctcacgcctctaataccagcactttgggaggctgaggcaggtggattacctgaggtcagaagttcgagaccagcctggacaacatggtgaaaccccatctctagtaaaaatacaaaaattagctgggcgtggtggtgggcacctgtaatcccagctacttgggaggctgacgcaggagaattgcttgaacccaaaaggcagtgagctgagattgtgccattgcactacagcctgggcaacaacagcaaagctccatctcaggaaaaaaaaaaaaaaaaaaaagagaaaggaaaaccaatgccagtactagcaactcctcttcctccgaaaaaatgaaaacaagaatgtaggaagggaaaggaattatacagcttaaactaatgaagcagaaaggacaaactcaattttgaacccactgaatttgccacaaatattgtagaaaatattctcaaggactttacagttgtctactttgattggcacatggttcatacaacagtatttgtgtcaaggcacatcttactgttttctggcggtcttcctctttccattgattttgtcatgatggttgattttcgttgtcaccttcctcttacggattttagctctaacttttgtttccacatgtctccgtagagtaatgacgtctttcaggccaattttatttcctcgaaaggaagaaactcttttctttgtgtgcatacaaatggacctcagcccttggtgagagtgaggagaggagaaggtgagaaacctgagggcaagaagctgttctttccctttccagggcaaactcatttccacactatgcggattccaacagagccataccttcctgtctacggcggttggacctccaggctctctgctgtacatccgtggatccatcatgtccatttcgagaccagaagatagtcttcaggagagacacctaggaaataataatataagaatgacggctgggcacggtggctcatgcgtataatcccagtacttcgggaggccgaggcaggtggatcacggggtcaggagttcaagaccagcctggccaagatggtgaaaccccgtctctactaaaaatacaaaaattagccgggcatggcagcgggcgcctgtaatccaagctactcgggaggctgaggcagagaaccgtttgaagctgggaggcggaggttgcactgagccgagatcacaccactgcactccagcctgagcgacagaatgagactctgtcacatacacacacacacacacaagaatgacatgaggctggcacggtggctcactcctgtaatcccagcactttgggaggccgaggcaggcggatcacctgaggtcgggagtttgagaccagcctcaccaacatggagaaacgctgtctctgctaaaaatacaaaattagccaggcatggtggtgcatgcctgtaatcccagctagtcgggaggctgaggcaggagaatcacttgaacccagcaggaaaagcttgtggtgagctgagattgtgccattgcactccaacctgggcaacaaaattgaaactcttgtctcaaaaaaaaaaaaaaaaaaaaaggccagatgcggtagctcacgcctgtaatcccagcactttgggaggccgaggcgggtgaatcacaaggtcaagagatggagaccatcctgggcaacatggtgaaaccccgtctctactaaaaatacaaaaattagctgagcatggtgatgcacgcctgtagtcccagctactcgggaggctgaggcaggagaactgcttgaacccaggaggcagaggttgcagtgagccaagatcccaccactgcactccagcctggtgacagagtgagactccgtctcaaaaaaaaaaaaaaaaaaaatgacatgaatatacttcacacaactgaactgtacacttcaacacggttagatggtaattatcatcttataagtattttaccacaggttaacatgtttcacaacttgaaaaggaagtaattaccttcagctctctgagttctagaatttgtaacatttcatcccctgctccttcctgatctgcactggagcatcttccttctgtccctgctctactcagagttcactttcccttccctcacatcagcttcattgaggctggtttgaacttaacgcaaaacattctcactaatgactgaattcccaccaagatttccatattatcacagtatgcttttaatcttctaagatattaaatatttcttctcatcatagctaaaatgcaatgcaaatcccatctcagatgtgggtcagatacctatgaatctcctgaggtggtcattgaaatgactttttcttgagacagagtgtcactctcaaccatgctgaagtgcagtggcgctaccttggctcacggcaacctccacctcccagattcaagcgattcttgtgcctcagcctcccaagtagctgggattacaggtgcctgctaccatgcctggctaatttttgtctttttagtagagatggggtttcaccatgttggcccatctggtcttgaactcctgacctcaaatgatccatctgcttcagcctcccaaagtgctgggattacaggcatgagccaccacacctggcctgaaataatatctttcaaattctttgtagaatttgttttttcctgatttctgcacataggataaaaaaaaaatcatgtactaggatttcgagagaagcaatgggtaatctaaaaagatgaaaagagcaaccacgtcaatcccacagctactgctagatttcataggaaaggtagctggcccagtttggagctaggggaaatgtcaaacacatgaagaaatgagaagccaagaaatgccatcacgcatgaatgcttcatggcacccatgatgtccctgcttaggaggtaatggtatagatgactagatgacaaggacaaagatgagaggtgcgaagttgtccaagtccaacagctcaactgaactttcctaagtggaattgttaaaaagtggtaaatttaaaaacttcccctggctcacgtggtggctcacgcttgtaatcccagcactttgggaggctgaggcgggtggatcatttgaggtcgggttttgagactagcctggccaacatggtaaaaccccgactctactaaaaatacaaaaattagctgggcatggtggtgggcacctgtaatcccagctacttgagaggctgaggcaggggaatcacttgaagccaggaggtggaggttgcagtgagccgaggtcacaccattatactccagcctgggcaacagaaggagactcgtcttcggggtgagaaaagaaaaaaaaaaaagaaaaaagcttcctccaatttataccgaaaattctctgttcaggactaagtggcatagagaatgttaaatgtgcctagatatcttcataactcatatattttctgttttctacatatcttgaaaggcagtgccaaatgacgtgtaattatctaggtggtaaaactgaaacatacttcctcttcccttgaatataaaaaagcattgtggtattagtacttttatcttggatcattgttcagaaggaggttcagcccccagacaaccacatttttactgtcatgaatggcaagacaaaatgtagagctcaacttacccaaaggaaaaaaggctcaaaagacaaattatggcacaacttagcagccaaattcttaccaagtacagacttttgacatactgatctctctccagttccaagtcggaacatgcactttgaatgatgtcattcaaaattaccctgcccagacacacttttcattgattctcttggagggcagttctaagagtctctggggctttctctgcatcatgagacgcagtgcagttctgcccttcaccttccggcagtttgtcacctcgtccctatgacctcacaggaactttgtctcaggccaattgtttgttccttggcctctttcatttcccctaaaaatcatttgctgcccctctaaatggcctacatctccatctatctccctctcccctcagaagagggtgctctttaagcatcagccatccggcccttctagcagtctcatttttcagctggttcccatgtttatgcctgttctatgtttttcttttcctgttaagctgtctgttgtcagctcatttctgcagtgaatcttcagagaagagattggaagctttccttccacccatacgatagaactacaaagcagaagagtttagaaagaatttcctatttaagtgacgaaacctcatactccatttgtgataaatagcacaaaggttaaaaaaacttatttttgaccaaaagctctgttgacattctattaaacaaacaccgacctatttaattttcataatgcaaatggcagatgttttcataattcttatactaataaatcatttccctgattttttgggtaaaaccacatattcataatgaagtccagaaatgtgaattgttttatataatttattcttatttgtgattacaagtatacctctacagaaagttagtatactcacccaaaggtaaactatccagagggtaatgacaactttataacttgtcggaaacgcaataatgacatgtaaccaaggacttccaccaaagtcagtcccacgatgatgatggtcagccagagtattgataacctggaataataatagttgaaataatgaaaaggtcaatgacactgacaatatttcactcagaaagaatcatccttagaaaccgtcaacctcctccaaaaggtaaccacatccctcagatatcaccgtgggattccactgctacaaaaaagaacagaagttagaagtcacatgtttttcagatggctggtagtgttttcaggcattgcaaatgtggggtgttgtctttcttggtataaagcagggatatccaatcttttgacttccctgcctatattaaaagaagcaaagttgtcttgagccacacataacatacactaacactaacaatagctgatgatctaaaaaaaacctcttttttttttttgagacagagttccgctccactcagtcgcccaggctggagtgcagtggtgcaatctcggctcactgcaacctccagctcctgggctcaagccattctcctgcctcagcctcccgagtagctgagattacaggtctctgccaccatgcccgactcatttttgtatttttagtagagatgaggtttcaccatgttggccagtctggccttgaactcctgacaggcgatctgcctgcctcggcctcccaaagtgctgggattacaggtgtgagccaccgtgcccagccatttttttgtttttgtttttgtttgttatttttgagatggggtctcactctgtcacccaggctggagtgcagtggtgtgctcccggctcactgcaacctctgcctctcaggttcaagtgattctcctgcctcagcctcctgagtagctgggagtacaggtgcctgacagtgcactcagcaaatttttgtagtttttgtggagatggggttttgccatgttggtcagggtggtctcgaactcctgacctcaggtaatctgcccgcctcagcctcccaaagtgctgggattacacgcatgagccactgtacctggccaaaatctcctaatgttttaagaaagtttacaaatttgtgttgaactgcattcaaaactgtcctgggccacatgcagcccgtcactcatgggtaagacaagctaagtataaagtaattatcttatcttttcttttctttttgttttgagacaaagttttgctctgtcacccaggctagattgcagtggcatgatctcaactcactgcaacctccgcctcccgggttcaagcgattctcctgcctcagctactgagtaactgggattacaggcgcctgccaccacgctcggctaatttttgtatttttagtagaaacagggtttcaccatcttggccaggctggtctccaactcctgacctcatgatccacctgccttggcctcccaaagtgctgggaatacaggtgtgagccactgcacctggccagtagttatcttttctttaaagttatttacttgttttttaaattgatgtataacattggatgcatttattatatatcacatggtaaaagaatccctctaaataatacttctctcttggattatatgaatctttgtcatttaaatctcagcataagtaaaaaaaaaaaaaaaatacaatgaagagattacttcattcacaaataagtatcaaattttagtgcttaaaaattaacaaggtgggctgggcgtggtggctcacgcctgcaatcccagcactttgggaagccgaggtgggtggaccacgagatcaggagattgagaccatcctagctaacacggtgaaacccgtctctactaaaaatacaaaaaattagcagggcatggtggcacgtgcctatagttccagctacttgggaggctgaggcagaagaatcacttgaacccgggaggcagaggttgcagtgagccgagatcgcaccactgcacttcagcctgggtgacagagcgagactctgtctcaaaaaaaaaaaaaaaaaaattaccaaggtggagatcatgaaaatggcatgaatagtgtgggatttctctaagattgttgatattaattccattagactcttatgtgagtgaagacgaagacttcccctgagtaagttcagacagcttctgataacatttctacgtcgattcctcaggatttaactatatattcttgaaaacatctcaattttaaatgtttctttcaagatggtgaattaaacagagatagcccttcaacaggttgaactcagcatatgctgagtctgaaatggaaatgatgaagttagagaaccatacaacaatggtaatgatttcagaaacatggtgttgagcagaacaaagcagacacaaaagagtacctatggcatggcatgcatctgtatacgcgaaattccagaataagcaagctaacctatgataagaaagagactggctgggaagactgagagttcactttctggggtgacataatagtgtagatcttggctgggcacggtggttcacgcctgtaatcccaacgctttgggaggccgaggcgggcggatcacctgaggtcgggagttcaaaaccagcctgaccaacatggagaaaccctatctctactaaaaatacaaaattagctgggagtggtgccacatgtctgtaatcccagccactcgggaggctgaggcaggagaatcgctcgaacctgggaagcagaggttgcggtgagctgatattgccccattgcactccagcctgggcaacaagggagaaactgtctcaaaataaataaataaataaataaataaataaataaataaaataatgtagatcttgaaagggggttggtttatgctggtgtatgtactttccaaagttagtaaacttacacttaaggttatatattttggccaggcgcggtggctcacgcctgtaatcccagcactgggaggctgaggcaggcagatcacgaggtcaagagatggagactatcctggcgaacatggtgaaaccccgtctctactaaaaatacaaaaaattagccgggcgtagtggcgggcgcctgtagtcccagctacttgggaggctgaggcaggagaatggcgtgaacccgggaggcggagcttgcagtgagccgaggtcccgccactgcactccagcctgggcgacagagcgagactccgtctcaaaaaaaaaaaaaaaaaaaaaaaaaaaaaaaaaaaaaaattagccaggcgtggtggtctactaaaaatacaaaaattagccaggcgttgtaatctgagctactcaggaggctgaggcaggacaattgcttgaaccccagaagcggaggttgcagtgagccgagatcttgccactgcactccagcctgggcgacagagtgagactctgtctaaaaaaaaaaaaaaaaaaaaaaaaagtcatcaaaccagatgacacaaatcaaatgacatttcactttgttttggtccattttctttgttaaaaacaagagtgcagcggggccatctcggctcactgcaacgtccagctcctgggcccaagcgatcctcccacctcagcctctccagtaactgggataacaggtacgcaccaccaggcccgactaatctttattggaattttttgtagagatggggtttcgctatgatgccctggctagtcttcaactcctggactcaagtgatctgcccacctcggccctctaaagtgctgggattacaggcctgagctgtgtaatttcatgccacgtgatacagcccagtaaaaaggaagaaaccccacgggtccagcgtctactcacagagatgcactgatggctgataaattccagtaggagcccaaagaggagccaaaagagcatccaccgcacccgcatgtcctggtcctttcagggcgccctgaggcggccaggacagaggtggaggtggcttagggcaggggggagggaaggggacgggaccggggccggatctgagttggggagggggaggggagggggaggggaaggggaggggaaggggggaagtaagggaagggaaaggaggagaagggggctgttgggcacctggaggaggtggaggaggaggaggagaagaagaaaggggtctgggaaaggatccggttcaaattaagttctcaagcgctggtggaaggtttagctacaggtcacggagaagatcagggaagcaacaggacacgcggggcaagggagcgtgaggcttaggagcaatcagagggagacaaaaaggttctgctatccaccaaaccttcttcggtctgggccctcccttaccaaccctggggctttatactccctctccaccaatccctgatgaccccggtggtgcctcacaatggacagtgcctcacaatggacaatgccaagtagcgcccgcatcattccaatgacccctcccccatctcagtctcccacactcctcccaaagacaggtcctctctggaaccttcacaaacctgatttctggtcctccccaaccagctccctgtccctgcttctgggcgctccttccttcctgagctcccagggttcctcaaggtcacttatggcgacaaaacataaaaaacaaatgatggcaggatggcaggaagaacctcatacccaagcagagtgccaggttttacagcctccgctcagccattcatatcctaagcaacaaaacatcagcagggtgcggaaggtcccgatagtaaaccatctccatcacatccatgtagccatccgtccatcaacctgtatctcaggaacaaatgtagatacattcattttaagcatgcctggtacatttacaaaaattaacctgacttattttgttccagcaaatctcaatatatttgagagcaatcaaatcacacagcatgtttctgatcatataactgtgctagaagtcaatgattaaaagctaattcaaaattattatttgcttggaaattcaaagtgcccttataagacataaacataagaaagaatccaaaatgaaacaagattgcctttcaactcaatgatgagatcataacatggcaataaaatgtctccctctggcctgggaattcctctttgtggcacaaggttgtgtgatctcaaatcaccgctaacccacctagacattttaacatccgaaaccgagtgatgacgtccttatctatatcatcttactgcctgtgtgtgtggactttaaattctgaacccaaatgagggggagaaaaccaagttgactttcatgactgagctctcagggacgtccaaggaatctgtgcatttcaagaaacaaagttcatcagcttctctcctaaggtatttgcccacaatacccagagggcttggcagcatcatgtgtgatgggtggggagctccaagcaggtgggcaggacccaggggcctggtgaccaggacagacccccactgtccatcaactttcctggccctgtcctctgctaaacttcccacaggccttctgcccgatcacacagagtatgcccaaactctctcaggcctctggcagctgaaaaccactgctttaaatccctttaccatttactatgacataaggttattgtaaacaggaaatattctattgatgctacaaatggaaagccaatgcctttaccataaatagaaaaacaaccctaagaagcaagcaaaacaaaaacaaaacgggctgggtgtggtggctcacgcctgtaatcccagcactttgggaggccgaggtgggcggatcacaaggtcaggagttccagaccagcctggccaatatggtgaaaccctgtctctaataaaatacaaaaattagccgggtgtggtggtgggcgcctgtagtcccacctacttgggaggctgaggcaggagaatagtttgaacccgggaggcagagtctgcagtgagccgagattgcaccactgcactccagcctaggcgacagagcgagactctgtctcaaaaacagcaacaactacaaacaaacaaaaaacagggttaacaaaagtatggaattcaattctttttatatgctgcagccatgttcctgccctagatttggctgggcatggtggctcacgcctgtaatcccagcactttgggaggctgaggcaggcggatcacgaggttaggagttggagaccagcctgaccaacatggtgaaaccccatctctactaaaaatacaaaaattagccaggcatggtggcacacgcctgtaatcccagctactcaggaggctgaggcaggacaatcccttggacccgggaggcggaggttgcagtgagccgagattgtaccattgcactccagcctgggtgacagaatggaatgagactctgtctcaaaaaaaaaaaaaaaaaaaaagcagccctagatttcggttgtggtggttgtaaaaggagagaccaagtaagtgggggttgaagtcagattagagcaaaagtgaatggcagagagtactataatgtccatgaagggctgctagagtcaccgtgatcatagcccaagcagagatagggaaaggaagatgtgagcagagtttggggtctcgaacaatggaggttattcgtgcagcccaggaaaggctccccaaagccaggatcaacctcccttggaggcggtccctcatggaggcatggtcaggcaccttagatttgagaacagctatgttgctgctgaccagctgtgtgaccctgggctggtttccttccacacaatgggagtgccaatggctgcatgcatgcaaagaccgtctgaggataggaggaagcaatctgttgagcacccgtgtacctgagtgtcatcacctcccaagggcatccttcgttccagagctggcgccttggaaggcccttggtcactgaaggcagtgatgatggtaacagcagtaaatcatcatttacggctgatgagggaaggccaggggtagggctcctaggtcctggataagaatgagggtctgggcactcctggggacagctgagtggtaggactcctgggtccccagggggaaggtccatcttcagtggcattgggcctaggctgggatgctgagttatccactggagcatcagcagtacaggcaggcacagaggcagtggatccatcggaggtggcaggtgtaggatcgtctggtgagcaagtagagtcaccaaatctggctgaccactacccccactacccccactatccccacagacgatgccctgtcccttgcctcatgctccggcagggtacaggctcgcacctggggcctcaaggagcatctctctaagacctctgtgtcctggtcattgaatgggcacttgagtcacccagggccattggaacaaagaggaagaatcaggccccacgatgttttgggagagtgtttagcacaggaaaatgcgcagaatacatgcacgacacgggggcactgtcagtgtgggagcaatggtttacaacctccagccctaatctgagcactctcacctgtgcaatctgaaaggaacaggagacttgcaggaaagacagtgcctggatttaacttaaaggaactaaaaatgttggaatttttactcttgatatccttccaaatcaactctctcaatgttcccatcctcaaaactatcatatggggtaactgaggcagtcagagatttactgactcaatgtcactcaattgattctgagttcactgctgattacatccgaccaaactgctttttctgaagtctactccgtttaatcatgctggtgatgattttgtgcggctctgggacaaactccacctggctgaagataaagcaaatctgcggtgacttagtcctcctgtcatttcccatcagttccccactctcctcctctgcccctccacagtctcccatgcaggctgacaccatatgacggccttaatggagtccaccgagtatttcaggttctctcctgggccacttgaaagtggatgtacccatgggatttgctttgacccaggagatgtgagtggaagtgaagcgtgtcacctcgaggcaaaagagttgggagccattgagacgggccactctctccttcatctcttagagcagctgacagctcccatatggaggctgctcctttattctcgtggcaggatgagggcatgtggggcacagggcacaggagagccatggaggatgtgcagcatgggcaggaaaagagccttcagtggtgtacatttccatagtttggggctgtttcttacctacagtgatacctagcccatcctagcaggcatgcaccatctactccacactctgtgatgcagactagcctgccgtcagaacacgaactggtggtcagacacaggtaggtttcagttccagctctgcctcttattgactgcaacctcaggcttaactttcagtctctgagcctcagtttcaactctgtaaaatgaggtggctataccatctcaggttgcagagagaattaaatgaaatataagtgcatgtagagcattgaacccagggcctggcacacacagtgagtacacaatgttagccaggtagcttcataatgcatactgattgttaatattcagacaatgcagtaaagtgttaccaaaaataaaagtaaacttatttgcatatgtattctttcaatctttatttttaaacagggtaaaactatgcatattctttcatagccagtgtttttctcttcatagtatattgttaaaataattttacttggaccgggtgcagcggctcacacctaaagtcccagcactttgggaggccgcggtgggcagatcacgaggtcaggagttgacacgagcctggccaatatggtgaaaccccatctctactaagaatacaaaaattagctgggcatggtggcacacacctgtagtcccagctactcagaggctgaggcagaggaattgcttgaacccgggagacggaggttgcagtgagccaagattgtgccattgcactccagcctgggggacagagtgaaactctgtctcaaaaaatatatgtgtgtgtgtgtgtgtgtgtgtgtgtgtgtgtgtgtgtgtgtatctatataaatctcaaaaataaaagatcatttttgagattatcattttaaaagacaagataatgttcaacttaatgactaatttaattattactattggactttttgtagactaaacagagcattcaaaacaaatgaaggagaataaaaaatatgtattacatgttgtaaaataaatgtgatgtggttaactcttttattcaaagttatagaacatatatatgtactatagaatgtatttcttattatgagtcatgttaaaaagtagtttagaagctgttgatttgaatttccttttcaaattttgcaggataatttttttttttttttgacagagtctcgctctgtcgcacagtctggagtgcaatggcgtgatctcggcccactaaaacccccacctcctgaatctaagcaattctcctgtctcagcctcctgagtagctgggactacaggctcacaccaccatgcccggctaatttttgtatttttagtagggacgaggttttgccatattggtcaggctggtctcgaagtcctggcctcaggtgatccaccagcctcagcctcccaaaatgctgggattacaggcatgagtcaccatgcccagcctaaacttggcaagataataaataacctttttaagtgtcgttgggcacttgtctggttgtttttctttaggttaccatgccagcaatgattccttttgagtttctgacagaagatagtggttttcatccaaataagtcaactactctaccccatccctaagccacttgtatggaaagaaaaagaggaagaagccagtactgtgactgcgtaagcttcccccagcatcacccgctatgagatgtgtggcagctgagacccgggaactgctcaagggcaccaggccccatctgtctgcactcactcaccttcctcaggtactcgcatgggcatgtcactgactttacatgctgctgcagctccttggtgagctggccctggtcatgggacaggaactgtggggtcaggacaatagagagcttcaccatttgcagaatgagaacaggggctcatgatgagtgccaacctattagataattttaaaaaaaaagtgttgaatgagtggaaaaacaaggtgatgtttgagtctatagtggtcaagggcttcagaaaaggacagaaccaagttcaaattcctgtactttgaatttctacttcatgccatgcaaaattactttaccccttttaacctcagttttcttctgtgtgaaacaggaacaatagtttcattcgtcattcagtttctctcaaggtttcacgagatcatacctataaaacatccaagtcatttaaatgtatcatcatttctgtcataattagtgggatccatttcactattattggatatacagttctgtgcctgaaacctacaaaaaaagaaaatgttaagtctaaaaagcattagtgatttctcatttttatattactaattataaccctatttaatcacacaaggccttgtccgtggcaggtgctcaataaacacttgtcgaatcaatgcatgtgggctccggagccacactgtttagattctattctgcctccaccacttatcagctgtgtgatctgggtaagataattcacctctttatgtctgcacttccctctccataaactatatataatgagaatccttagctcattcggttgtggtgaggggtgaatgatttggcacacaggaggggcttgttaacattagctgtgatgatctccttccaaatcttcattttcagagccacagatgaggccacagtgcaaccaggtgaccttagagtgtaagtacacgatcgccagctatgctctatctccaccataggtccaagactgggtagttctggcctggaggtttctgctacatctgccttctcagtgttcacctaaggacttttgtattttcctcctcgcatccccacagatggggttcaggctgccggacacagctgggtgatgccagggcagtggtcacctgtgccagccccgtgaggtagctggaggatcattgttccttccttctcgggctctgggcagatgccagggctggggtgacccatgccctcaagtttcttgctttggtgggccacattttcccttggcaaagagggtaaaggtcacaggatgccagagagctgtgacttctctgtgccctgggcccaaactatgaagacctgacacactatgctaaaagtccaaggctgggtgctccccagagcttcttgcctcaccgcttctgctgagggaggaatgaatactatgtcctcccagagctttgggagcttgtagcaagcagcctccccagcgcaaaatctcttggaaacctctaactgtgtctgaaacattagtgcaaatgttgcatcctatttcccatatgtccgcatgttttagaaaaaaatcctcaatttcctaaatatgcaagaaaaatcggtattgtaggacaatgtgactttttaaaaaatgttatttaaaaatcttccccacctccttttctgccctccaagactgccaaatacttgttgaacatatattattaaatgcctactacatgccagccatgattcatggtcttggggacacagcagagaacgaactgacaggattcctctcttatgtaactcacattcttatatgataatgataagggttaacattaattaagctgtcactgcatgttagtcacggtgcagtcattcccacacattattacacttaaacctgccagcaagcttgcaaggtagttgtttttcctttaaaaactgagtctcggaatgatgaagcactctgtccaatgtcacacagctagtaagtgtggagaccttgcatccaatcaatgcccgtctcattctaaaggccatgttatgtgttctccagcccatggagaataattttaacacagtcaatgaaatttctacacaacaatgttcttgtctcaagtccaagaatgcctcctacacctcctataatactggctttctggtgagtaaagatgccattctcatgtgtaatcaggtggcaaatggagatatgaccaaagtaaccatctgcctacactcataaccctgtacacactcttcctgtgtcgattcaattcaagtaccccttttgatcacttagcaaatctgacctttaaaagggttagggtttttatatccatgtaagtttctgtattgctttggaagtctctggttaaattaatactcttttaatagtgacctgtgattctgttttgatcaagtgttttcaaacttgacgtctttgatgggtttctccagtgtcaaaatcctaaatcaagtctttttggcttaaaactaactttgggatttttttcagctgcatcccttggggagtctaaagaatgtatctctcatcttgtagaggtattaagtgattcgatttatttggtagattaaatgggcaggcattgtcaaatgtggcgatactgcatgggagggcactgtcaagtgaggtgacattagatctcatctcagttatatttatgggtatgttgttgatatgcgtgttccaaaaattgcatacatttatacaaatttaatatgatttgtaattttgatagttatgctaaatatttgctaaagttatatttgtataaacatgtcacgaatggctgggcaccgtcactcatgcctgtaatcccagcactttgggagacaaaggcacgtggatcacctgaggtcgggagttccagaccagcctaatagagtgaaaccctgtctccactaaaaatacaaaaattagccatgcctggtggcacatgcctgtaatctcagctactcgggaggctgagacaggagaactgcttgaacccaggatgcggaggttgtagtgagccgagatcatgccactgcactcccgcctgggtgacaaaggtagaatctatccaaaaaaaaaaaaaaaaaagttattatttctgaagattgtatgaaattcataaaagtctgctggccctgatatgatgctgtcagtcatgattctgattactgtcttaaaatgctgcacataagtaattaaatttccttgtgaactgggaagtttcatcagacttttatcataactattgtttccatcatccacagttactgttttgaattcttctctaaaaatatttgtaattggcaatagtccaaattttcttttgttttctttcctgtttttgagacacagtctggctctgtcgcctaagctggagtgcagtggtgggatctcggctcactgcaaactctgcctcccgggttcacgccattctcctgcctcagccacccaagtagctgggactacaagtgctgccaccacatccagctaattttttgtatttttagtagagacagggtttcactgtgttagccaggatggtctcaatctcctgatctcgtgatctccgcgcctcggcctcccaaagtgctgggattacaggtgtgagccaccgtgcccagcctaatttttgcatttttagtagagaggaggtttcaccatgttggccagggtggtctcaatctcctgaccttgtaatccgcctgcctcagcctcccaaagtgctgggattacaggcgtgagccactgcaactgactttttttttttttttttttttttttttgagacagagactcactctgtcacccaggctggagtgcagtggcatgattttggctcactgcaacctccacctcctgagttcaaacaattatcctgcctcatccttcggagtacctgggattacaggtgcgtgccaccgtgcccggctcatttttgtattcttagtagagacggcatttcaccatgttggccaggctggtctcaaactcctggcctcaactgatccactctcattggccttccaaggtgctgggattataggcgtgagccaccacaactggctcagtaaatacattttttattatcaaaaaagagtagtgtatggttggcgtattctgtgtagaatgtattttattgatgtctcctatttttataatttctgagttaagtactttttaattaatgctttttagttttgggcagattcagttgactaaagcacctcatttcccagatacatgaaataaaatatttggcttcttttccaatttcacactgatgttattttgtgaaaatcagtgctttaagataaatcgttatacgttaagataaacatgagaaacttgatctaatatttaatatttattcagttctacactttattaacttctacaccagcagatttagacattatgtaaccatctcaagaagtttcacttggatgtaatgcttcacgcttgtaatcccagcactttaggaggctgaggtgggaggactgcttaaggcaaggagtctgagaccagcctgggcaatacagcaagatcccatctctattttaaagaaaagtttcactttgggaggccaaggcgggtggatcacaaggtcaggagatcgagaccatcctggctaacatagtaaaaccccatctctactaaaaatataaaaaattagctgggcgtggcggtgggcgcctgtagtcccagctactcgggaggctgaggcagaagaatggcgtgaacccgggaggcagagcttgcagtgagctgagattgcgccactgcactccagcctgggcgacagagtgacactccatctcaaaaaaaaaaaaaaaaaaagtttcggcaaattccatctaagaattccaccagagttctgttgtctccaatgtcatcttccacagatttcaagttgtgaagccctgaactgttaatttatcttgagaatgtatatttaagcttaatttaagactatatacctaaaaattgagcatataatttctataatttgtttatgtaaatttctgtaagtcataagtatgtggtttccaagtgtataatttatctgaatgtaataggcattaatatattttacattactgggaccatagtacagaaatttctaaatggtttgtaaaataacttgttatttgtgttgttgtaaaagcagttaatacaatggaaaaactcgtaataagaagatacagtttaacatcaaaaagtttacccaaggtaattatgagtactacctggcaaaacttcacggaagctgtggtatcacttttatgatggaagaatggtgtttgcattttgtgtaaaagtacttgcggctgggcgtggtggctcatgtcccagtgctttgggaggcgaaggcaggtggatcatctgagcccaggagtttgagaccagcctaggcaacgtggcaagagcctgtctctccaaaacctacaaaatttagccaagcttggtggtgtgagcctgtagtcccagctacttgggagactcacgctggaggatctctcgagcccaggaggcagaagatgaataaataaatggaagcaactgaatgggatgaggtctctcttgaaggagagagcaaaagagatttaaatagtaacaattataataaggctgggcgcggtggctcacgcttgtaatcccagaactttgggaggccaaggcaggcggatcggttgaggtcaggagttcaagaccagcatggccaacacggtgaaaccctgtctctattaaaaatacaaaattagccggacatggtagtgcgtgcctgtggtctcggctactcaggtggctgagacaggagaatcgcttgaacctggtaggcacaggttgtagtgagccgataaatataaaaagtattagagtactaacagaggaaagtttccactgatcaccttttagctttaaataatgcagaagcatttgcccagtttacttgtaattaaaaatcatgcatcattcacaatttatatcttttttgtttgtacaaaaatgaacacaagttattctcttttatctgtattgtgattggtttggtgagagggaattaggccacttgagagtttgtgtgtgtttacaattttctggccaggcacggtggctcatgcctgtaatcccagcactttgggaggccaaggcgggcggatcacttgagctcaggagttcgagaccaaattgggcaacatggtgaaaccctatctctacgaaaaatacaaaaattagctgagtgccgtggcttgcgcctgtcctcccagctacttggggggctgaggcagtaggatcgctcaagcccaggaggtggaggttgcagtgagccaagatcacgtcactgcactccaggaagggcaacagagcaagactccttctaaaaaaaaaaaaaaaaaaagaaagaaagaaaagaaaattaactttggtatttcaggttgtatttaaatggagacttaacatgaactatgttcataacacttgaccaaattaagtgtagatcgtctctttaataaagagatcatctggaactgcaatttctaactcatacatcattgctacaaaccttatttgtttactatttctcttccaaggaccatcagtcatcctttaaaattcatttcaagctctgaaaagatattttttgttacatgggcaatttacttttagtacagtaaaatgttatgtgaatttctacagtatgtttgccaaaatgaattatatctagaatacgcttaacaatatattctggaggcagctttcatttgaaattaggttcaccttctgagagtatgaaaaagttaatgggtttttgtgcctgaagattttgatgttgcatttggctacatttaatccactttcacccataagttttaacatctaaaaaaattaaatcactgctaatgcaattaaaatgcattatgaaatgcatttctgtccaggctggagtgcagtggcacaatctcggctcactgcaagctccgcctccctggttcacaccattctcctgcctcagcctccctagtagctgggactacatgtgcccgccaccacgcccggctaattttttttttttttttttttaatgaggcggagtctcgctccgttgaccaggctggagtgcaatggcatgatcctggctcactgcaacctctgcttcctgggttcaagtgattcgcctgccttgctgggatgacagacgtgcaccacaatgtccggctaattttgtatttttagtagagacatggcttcaccatactggccaggctggtcttgaacttctgacctcaggtgatcccaccttggcctcccaaagtgctgggattacaggcatgagccactgtgcccagcttaagatctctgttttaatgttaatgctggtcagttgtgtctggattccagagggaggaaggtagaatgaggcatgttgacacctccccttcccatcatggcctaagctggtcttttcagtttactttggaatgtccttgctcaacaggaagggtccattcagtcggattgggtggcttagaattttatttttggtttacatctcaactatcacagcagccgggcgcggtggcttcacagctgtaatcccagcacattgggaggctgaggcaggggtatcacctgaggtctggagttctagaccagcctgaccaacatggagaaaccccccgtctctactaaaaatacaaaattacccgggcgtggtggtacatgcctgtaatcccagctactcgggaggctgaggcaggagaatcgcttgaacctgggaggcggaggttgtggtgagctgagatcgtgccactgcactccagcctgggcaacaagagcgaaactctgtctcaaataaataaataaataaataaataaacaaactatcacagcataaagtaggaatatttcgttactgtctagttaaactggttaatgcagaaaggaagtctggaaattccagttttaaagtaaaattttggacattgtaggattgattatttggcatagttgtgatgtttgttcctgcgttatggttttgttggcagggcagcctttaaggacctgtatattttcttctagactctatatattccctgtgagtattagttgtatggtcaaactggcaaattttaccataggtataaataatagagaatgtggaagaatagtgaatagtgtcagagatagttaaaagtccatacaatagtagagaaggtaataagtaatagtggcttggactaaatatttgttgaataaatgttttaaaaaacaggctacctacaatttgtgttgaagatatgaatgaatgaagtttccacacctttatgtggagacctgataagtaagcaacaataaggaagggtccccaggttggggagagccccaagttgagaacaataatgaacaatgattgtatgaacaattgttagaaacagctaatcacaaacaacctgcgggcacaatgacctcattccacacgtagcacccttcagcaggaccctataaaactttcctccagcccttgcctctttgcaggtagccccttctctgctgagctgcccactgcaacatattttcacaatttctctaataaatctgcccttctttacctacaactatcttggtaaatggctttaccacctgcaaaactgaccctaggttgttgctacccgatatggtttggctgcgtccccacccaaatttcatcttgaattgtagttcccataatccccatgtgtcgtgggagggacccggtaggaggtaatcgaatcatgggggcaggtttttcccatactgttctcgtgatagtgaatacatctcactaaatctgatggttttataaagggcagtttccctgcacgtgctctcttgcctgctgccatggaagacatacctttttgctccttgccttccaccatgattctgaggcctctccagccttgtggaactgtgagtacattaaacctctttttctttataaattacccagtttccagtatttcttcatagcagtatgaaaagtaactaatacactacccgagacatcttaggagatttgtaatagctgtaatgccaggtccaccatatttttagcataaagcaaatgtttacgcgtgatatgactgcacgggctttctttcagctggagccatagcaactcaagtagtaaccctatcttagtctgattaaaagtaaatattagtctgggcatggtgggacatgcctgtaatcccagtactttgggaggctgagacagaaggattgcttgagcccaggagtttgagaccagcctgggcaacatggaaaaacaccatctctacaaaaaatacaaaaattagctgagcgtggtggcacacacctgtagtcccagcaccttgggagggtgaggcaggaggatctcttgaacccgggaggtggaagccgcagtgggcaatgatcatgtcagaggtgtgtgaaccagagcaactccatcttaaataggagccaggaaaaatgaggctgaaactactgggctgcattccctgatggttaaggcattctaagtcacaggatgacatagaaggtcagcacaaaataccagtcataaagaccttgctgataaaacaggttgcagtgaaggagctggccaaaacccaccaaaaccaaaatagagacaagactgacctcccatcatcctccctgctacactcctaccagcaccatgacagtttacaaatgccacggcaacatcaagaagttaccctatatggtctaaaaagaggaggcatgaaaaatccactccttgtttagcatatcatcaagaaataaccataaaaatgggcaaccagcagccctcacggctgctccgtctatggggtagccattcttttattcctttactttctctctttttttttgagatggagtctccctctgtcacccaggctggagtgcagtggcgcgatctcggcttactgcaagcttcgcctcccgggttcatcccattctcctgcctcagcctccagagtaggtgggactacaggcaccggccaccacacttggctaatttttttgtatttttagtagagatgaggtttcaccgtgttaaccaggatggtcttgatctcctgacctcgtgatccacctgtctcggcctcccaaagtgctgcgattacaggagtgagccacggtgcccctcctcctttactttcttaataaacttgctttcacttcacactgtggcatcaccctgaattctttcttgcacaagatccaagaaccctctcttggggtctagattgggacccctttcctgtaactatcatgctactgcactccagcctgggcaacagagcaaggccctgtctcaaaaaaaaaaaaaaaaaaggaacatgacttaatacattcattttggaggataagtctctcaaaataggcctttcactgggggaaaatggtaaaaatactccctggtaattcaagaattggagactcctgagatgctgctcatattagctgagcacttatcaatacttcacttttttccatatatactcaaggaacaagtgctatttaaagtgtttcactccactgggctaggtgcaagactataaagaggtgtgaggatcaacacttttatgaaaaccagtgtcattctggatatagtttcagatgctagtgcaaaggaagctcttggtatacggaaaaagtattcaacaataaattaggcatggttgcttccattttctgcctcacatactttttttttcgtggttaaagtgatataatgtctatgatattttagattggcagttgcaaactagtggtcctcagcgtgctttttatgacacctacaaggtctgaagactttgatttcatattaaaaatctgggtttcaggctgggtgtggtgttgcatgcctgtaatcccagcactttgggaggctgaggcaggagaatcgcttgaaccagggaggtggaggttgcagtgagccaagatcgcgccactgcactcaagcttaggcaatagagcaagactccatctcaaaaaatgaataaataaataaataaaatctgggtttcaggccaggtgtggtggtgcactcctgcaatcccagcactttgggaggctgagatgggcagacagcttgacctcaggaattccagactagcctgggcaacatggcgaaaccccatgtctacaaataatacaaaaaaattagctgggtgtagtggagtgtgcctgtaatcccagcaacgtgggaggctgaagtgagaggattgcttgagcctgggaggttgatgttacagtgagctgagatcgccctcctacactccaacctgggcaacagagccagaccttgtcttaaaaaaaaaaaaaaaaaaaaaaattctgggtttctggcatctcaaaaaaaaaaaaaaaaaaaaaaaaaggaaaggtcagggcacatggctgctacagtcctctattaagcaatgtgccacagcagggtccctgacccctgggccatggacatgtactggtctgtggcctgttaggaactgggccacagagcaggaggtgaatggtgggtaacaattgaagcttcgtctgtatttctggctgctccccattgcttgcattgctgcctgagctctgcctcctgtcagatcagcagcatcattagattcttacaggagcatgaaccctgttgtgaattgcacacacgagggatccaggttgcatattccttatgagaatctaattcctgatgatttgtggtggaacagtttcatcccaagaccattaccatcctgcgccccatcccttgccgcctgtggaaaaattgtcttccacaaagccggtccctggtgccaaaaatgttggggactgctgtgctttagaatctgccatgaatctgcagcctctattatatagctccctatagactttgcttcctaccgtcttacgttctgccttataggcatttgactttgcaacccttgtttttgttagtatgctacgctggtgacattgaccaaattgaccacacattaattataagcttagttggtgatgacctcaacggaataacgtgacataagtattgtgacaatacttcttgcatgtatctgcaggtggaattgtaaacctggtggtccgagatggtctaattccatcttcctatgtatctccttatattaatagtggtaacatttgtggtggtgattcagcatttcaatgcctcttctcatggcaacaacaaacgttttccttctgaatcaacattaacctagatgttactgcggatcaaaattagactctacattttcaaccacagaaataccgagcagtaaaaatttttcttaatattgattgcctacataggttgtgtaattagcatatgtttacagttctatgatttctgcgtggctgctacagagctggagggggtaaagcaacagtattttctcagttgtccgagcagcattacattataataaataggtaatattaaactgggctgatgagagttgcaaaagactactttaatgttcatatggaaccaaaaaagagcccacattgccaagacaatcctaagcccaatgaacaaagctggaggcatcatgctacctgacttcaaactatactacaaggctacagtaaccaaaacagcctggtactgctaccgaaacagacatatagaccaatggaacagaacagagccctcagaaataataccacacatctacaaccatctgatctttgacaaacctgacaaaaacaagaaatgcagaaaggattccctacttaataaatagtgctgggaaaactggctagccctatgtagaaagctgaaactggatcccttccttacaccttatacaaaaattaattcaagatggattaaagacttaaatgttagacctaaagccataaaaaccctagaagaaaacctaggcaataccattcaggacatagggatgggcaaggacttcatgtctaaaacaccaaaagcaatggcaacagaagccaaaactgacaaatgggatctaattaaactaaagagcttctgcacagcaaaagaaactaggatcagtgtgaacaggcaacctagagaatgggagaaaatttttgccatctacttatctgacaaaaggctaatatccagaatctacaaagaacaccaacaaatttacaagaaaaaaaaacaaaccccatcaaaaagtgggcaaagcatatgaacagacacttctcaaaagaagacatttatgcagccaacagacacatgaaaaaatgctcatcatcactggccatcagagaaatgcaaatcaaaaccgcaatgagatatcatctcacaccagttagaatggcgatcattaaaaagtcaggaaacaacaggtgctggagaggatgtggagaaataggaacacttttacactgttggtaggactgtaaactggttcaaccattgtggaagacagtgtggcgattcctcagggatctagaactagaaataccatttgacccagccatcccattactggatacatacccaaaggattataaatcatgctgctataaagacacatgcacacatatgtttatcgcggcaatattcacgatagtgaagacttggaaccaacacaaatgtccatcaatgatagactggattaagaaaatgtggcacagatacaccatggagtactatgcagccataaaaaaggatgagttcatgtcctttgtagagacatggatgaagctggaaacgatcactctcagcaaactatcacaaggacaaaaaaccaaacaccgcatgttctcactcacagatgcgaattgaacaatgagaacacttggacacaggaaggggaacatcacacactggggcctcttgtgtggtgggggagggggaagggatagcagtaggagatacacctaatgtaaatgacgagttaatgggtgcagtacaccaacatggcacatgtatacatatgtaacaaacctgcacattgtgtacatgtaccctataacttaaagtataattttaaaaaataagtaaataaataaataaaaaaagaaacaattgctggctttgcaattctctttcctccaaaatcgccaaggcctcaatttactcattgctgaaaaaggacgactctgtatatttttaaatgaagagtgttgtttttacctaaatcaatctggcctggtatatgacaacataaaaaaactcaaggatagagtccaaaaacttgccaaccaagcaaataattatgctgaacccccttgggcactctcttaattggatgtcctgggtcctcccaattcttagtcctttaatacctgtttttctccttctcttattcggactgtgtgtcttctgtttagtttctcaattcatacaaaaccgtattcaggccatcaccaataattctatatgacaaatgctccttctaacaaccccacagtatcagcccttaccccaaaatctttcttcagttgaatctctcccactgtaggttcccaggccgcccctaatcccgctcgaagcagccctgagaaacatcgcccattatctctccatatcacccccacaaattttcgccaccccaacactttaccactattttgttttatttttcttattaacataagaagacaggaatgtcaggcctctgagtccaagctaagccatcatatcccagtgacctgcacgtatacatccagatggcctgaagcaactgaagatccacagaagtgaaaacagccttaactgaagacattccaccattgtcatttgtttctgccccaccctaactgatcaatgtactttgtaatctgccccactcttaagaaggttctttatcatctcccccacccttaagaagtttctttgtaattctcctcacccttgacaatgtactttatgagatccacctcctgcccccaaaacactgctcttaactccaccgcctatccccaaacctataagaaccagtgataatcacaccaccctttgctgactccttttttggactcagcccgcctgcacccaggtgaaataaacagccatgttgctcacacaaagcatgtttggtggtctcttcacacagacacgtgagacaggagttcgagaccagcctggccaatctggtgaaactctatgtctctactaaaaatacaaaaattagctgggcatggtggcgggcacctgtaatcccagctactcgggaagctgaggcacaaaaattgcttgaacccaggaggcagagtttgcagtgagccaagatcacactgtcaggcctctgagcccaagccaagccattgcatcccctgtgacttgcacgtatacatccagatggcctgaagtaactgaagatccacacaagaagtaaaaatagccttaactgatgacattccaccattgtgatttgtttctgccccaccctaactgttcaatgtactttgtaatctcccccacccttaagaaggtactttgtaatctccccaacccttaagaaggttctttgtaattctccccacccttgagaatgtactttgtgagatccacccctgcctgcaaacatggctcttcaccccctatcccaaaacctgtaagaactaatgataatccaccaccctttgctgactctcttttcggactcagcccgcctgcacccaggtgaaataaacagccatgttgctcacacaaagcctgtttagtggtctcttcacacggacgcgcatgaaacacacgaccgcacttcaggctgggcgacagagctagattccatctcaaaaaaaataaaacaaaaaggagtcacctcccccgagaggcctctggaccaccccatctgagcaggccactcttccttctctatcttaccatcttgtttctgtcccagtagttagggctacctccagtaatcctatttgtccctttactgtttagtgcgtctcgcttgactagaagctccatgaaagcaagagaccctacctgcctccttcgccactagacccccagggcctggtatgtggtgatcgctcagggcccattttcttcctttcctcctcctccaagggtggggaaagagcatcagaaggtctaggtggccccaggcccaaacaatgctcctttaaaaggaaaccagattgttacaaaggtcagaggctgaaaagttatttccgccttttatccctctaaattcttcacttcctgaaaaaacaaacaaacaaaaaagccactgagggcccttggactaaatccaggcctcagttgctgggcagaggtcagtcttgtccagacatgggaaaaaaataattcgagtcagacaggtgggtcaccagagaacgaatccagcctgcaaatggcctgtgcaatcttcagctctgtccagacctgcctccctttggggatgcctttaaaggtgatgaatgatctggatgaatgggcttagaagataagagggaaaaacaaatatcacaggtcaaatcgttatttgtcttcaagtttaacaccgtctactggactaaaagatgtccaaagaatagttgttcaactatgtaaattcctttttttctttttttttttttttgagacagagtctcgctctgttgcccaggctggagtgcaatggtatgatcttggctcactgcaagcaacctctgattttagtattgttagtacagacagggtttcaccatgttgaccaggctggtctcgaactcctgacctcaggtgatccacctgcctcggcatcccagagtgctgggattacaggcgtgagccaccgtgcccggccaactacataaattcctaacaacgtatctccagaaagtataggcacaacagcacatgcagtcattcctgtaattaagtgctccgggaggccaaggcaagaagatcccttgagcccaggagtttgagaccagcctggacaacatagcaagactgtgtctctacaaaatatacaaaaattgggctggggatggtggctcacgcctgtaggcccagcactttgggagaccaaggcaggaagatcgactgaactcaggagctcgggaccagcctggacaacataacgagacccagtctctactgaaactcaagaaaattagccagacgtggttgcatgtgcctgtagtcccagcactttgggaggccaaggtgggtggatcacctgaggtcaggaggtcgagaccagcctggccaacatggtgaagtctcgtccctactaaaaatacaaaaattagccaggcacggtggcacacacctgtagtcccagctacttgggaggctgaggcaggagaatggattgaacccaggaggcagaggttgcagtgagccgagatggcaccattgcactccagcctgggcaacagaacaagactccatcaaaaaaaaaaaaaaaaaaaaaaaaaaagaaagaaagaaagaagaaaagaaaattagccaggtgtggttgcatgcacctgtagtcccagcactttgggaggccaaggcaggaggatcaatcaaggctaggagattgagactgcagaaggaaaccctgtctctaaaaacaaggtccagctaaaatcagggtccagctccaccacaagcgcagctccaggggctgttgagttttgcctctaccattccaagtagtctctgctccagaccaagtcccaccatctggcagtcatgtcagtctaaccacagtcatatcagggcgcttccagtcattgagtgccccttgaggaggctggaggagaggccaatgacatttgcacttgagactccagagtctagatttataaccactatgttatggctgccagtgtggctgcaaggacacttctttcattcattcatttacaatagatgtagcatctgctgtgtgccagatgccattctaggttatagggaaacaaggcagagcccctgttttccaaggcatccacattctaggaaagactgctaccagcctggcgtggtggctcatgcctgtaatcccagtactttttgggaggccgaggtgggcggatcacttgatgtcaggagttcaagaccagccaacatagtgaaaccccgtttctactaaaagtacaaaaatcagctgggcatggtggcacgtgcctgtagtcccagctactcaggaagctaaggcaggagaattgcttgaacctgggaggcagaggttctggtgagccgagatcatgctactgcactccagcctgggcaacagagtgagactccataaaaaaaaaataataataataaaataaagactgctactaaacaataaaataaccaaaccagatagatgacttcaggtggtggtaagagctttgaaagaataagcaaggtaactaactggtcagaggaagggagatgggtgcattccctcagatagaccgccccagaggtctgcctctctgacatgacatttgagcagagacccaacaggaaaaggaagagactgctctatggccaggcacggtggctcacacctgtaatcccagcactttgggaggcccaggcgggcggatcacgaggtcaggaaatcgagcccatcctggctaagacggtgaaaccctgtctctactaaaaatacaaaaaaattagccgggcgtggtggcggatgcctgtagtcccagctactcggaaggctgaggcaggagaatggcatgaacctgggagatggagcttgcagtgagccgagatcgcgccactgcacttcagcctgggcgacagagtgagactccatctcaaaggaaaaaaaaaaaaagaaccaagaggtgtccaggcgaagagaacagcagatgcaaaggccctgtggcagaaacaatcttggtatgctggaggaataggaaggcagccagtgcagctggagcaggataggttaagggaggatcaaggtgatgagggcctggaaagaggggctggggtcgaatcaccagatcctgttggttgcaatggaagagcctggagtttattctcagagcagtgagaagccactggaaagttgtttttttgtttttctgtttttgagacagagtctagctctgtcacccaggcagactgcagtggtgcaatcttggctcactgtaacctctgcctcccaggttcaagcgattctcctgcctcaggctccccagtagctgggattacaggcacatgccaccacacccatctaatttttctttttcttttttttttttttttttgagacagagtctctgtcacccaggctggagtgcagtggcgcaatctcagctcactgcaacctccacctccctggttcaagcgattctcctgcctcagcctcccgagtagctgggactacaggtgcatgccaccatacctgggttaattttttgtgtttttagtagagacaagatttcaccacgttagccaggatggtctcgatttcctgacctcgtgatctgcccaccatggcctcccaaagtgctgggattacaggcgtgagccaccgtgcctggccagccaccggaaagttttatgtaagcaggggagtgatctgttttatcatttagaaggatacacacctcttcttctttttttagagacagggtctagttctgtcacccaggctggagcccagtggcacaatcatagcttactgtaacctcaaactcctgggctcaagtgatcctcctgcctcagcatcccaaagtgctggattacaggcatgagtcaccatgcctggtcacacttctcattctttaaaccagacctcatttgtccatctcccccatcccccgccccaccccacggactgtcctataatgcccatacaacaggtcactgtttagaaagtgctacaaagttacaaacacagtcccttctgagcctcccaccaatgttggtgggtacaaggtcaaaaaaaaaaaatctcatctatctaaggggcataggagactttttagttagagggcccaattatagtcctcctgaaaagatgccaaaagtccccttcaacacttagcaaagattcaagaaagatgaatctcacattctttgtatgggaaatgaggaacttgacatcttcaatataatggattccactaaaataagatgacgatcaataggaaccaactaaaaaaatacttgactagctgttattgaaaggctgaaattcagctgacataagcagtattaatattgagctagaaaataattcgcattgaattcagcccaacttttgttttctgatttgggtctcttctaaattttttttttcttctggacattgggaacaatccaatttgaaggcctcaatgcccaaatctacactcttgttttattctatatccttggtttcttttttttttttttgagatggagtctcattctgtcgcccaggctggagtgcagtggcgtgatcttggctcaatgcaagatccgcctcccgggttcatgccattctcctgctgcagcctcccgagtaattgggactacagatgcccgcccccacgcccggctaatttttttgtatttttagtagagacggggtttctccgtgttatccaggatggtctcgatctcctgacctcgtgatccacctgcctcagcatctcaaagtgctgggattacaggcgttagccaccgtgcccggcccacacctaggtgatttttaaagttcttctagtagagacagggtctcactatgtcgggtcgccgtgtttgatgtcagttttccctgccagaatctacaatctccttgatcaccattatatcccaacgtagagctcagtacctggtacaaagcacatttgatcaatacttgctgaataaagaaataaaaatgaagaggcactccagcctgggcaacagagtgagatggtctcaaaaaaacaaaaacaaaaacaaaaaacgactggaaaggagatgagggtacttgtgaagccatattatatgacacgctctgtgctaggacttttatataccttgtctcatctcttcatctcatataatccttacaaggatctcaaaagtggggaaatccccatataactgaagacgaaggcagttcagaagttcactgatttgccctaaggttcctcaatttgcaaacgtcaggccaatgatccaaccccaggtatgtttggcagtgaaggaccagttgagtcacagctgcaagtaaccaccctgcagtggtccctatcttggccgttagcttacattgacatttaacactcaaatttactcagtaacaccagctatcatgttttccactaaaactccacagcattctggcaacttttctattttagagcaataaagtaaattgttagcatccctttgacatataaatatttctacaaatagtaattctctagccattcatttggagtatttaaaactcaacattcatagcacattttatgtgacaaagaacttctgttcagaacacaaaaataagtcgtacatcttcattaaaaacgggtgaagaatttgaacaaacatttgcaaactaaaatacaaatgaaatacactcaacatcattagtcatcaagaaaataaaattatgagataatcactaataatcactacatatgcaccacagtgattaaaatttttttaagttaagccacgtgacccaacaaggtgcattcactcaagagaaacgcaaatatatgtccactcaaagacttgcacatgaatgttgagagcaggtttatactgaatagcgcaatgtgaaaaaaccccaaaatctagcaaaggatgaagggagaaataaactgtggtatatacatacaatagaacactactcaataataaaaaggattatattcctgatacatgcaatatgggtgaaccgtaaaaatatcatgctgagcaagagaagccaaacacaagagaacatgttgttatgatttcacgtacatgaaactttagtaaagacaagtctaatccatagtgacagaaagcaaatcagtaactgctgacaggggcaaatgaggagatgatctcaagggaaccttctggggtaagatgctgttctgtatctcgatcgtattggtggtcacacaagtgaagacatgttagaactcatcaaaccatacacttagaatgtgtaatataaacctcaataaagcaaaattaaaaaaaaaaaaccacctttaattttctcttacaaaaaaaaaaaaaaggaaaaccacttaactttaattttctccaacaactgattctggtacacagtataccttaatgcctgcatccacggcctcacgtcatgctgtttacatgaacgtaaagcttcgccgaagagtggaataagacagtcctgccagagaaaaaccaaaattactcaacgtaaaacaggctgttgatatgtttgcagatatatagcaagtcttaagtccaagactgcaatatagtttggctacttcagattgattgcagtagttttatctattacactatacccttccatcatttatcttctactcacaagaggcaagcacacagtaagagaaagccttttgttttgaagggaaatcttcttcagaatattaagtctaatttatcaatatacttaataaagcacattacaaaaaaaatgtcacagcacatttactataaagcagactgcagaaaaacattacaactaatgctttattatgaagttctcgaagatcaccattcattcagaagcccccatctctggtcgaactttaccccatttaggatgaagaggagagatctttgtttgcagcaaatctaaaatttacgtaatccgcctaaaggaactgtctttacatacaccacctcccaccccaaaaatagaagaaaaaactgagcaatttgccatccttgcgattatctcaggttcttccatctgccccatgtacttcccaaatgaaagactgcctgaaaacggcatgttagatttctggatttaccagcttgcccaactacaaatcctattccaaaaaactcaaaaaataaggtctttgttctacagtaatgaccattaatagtcataagagtgtgcttgtaaaaatatacagacctctgttgaaagtctgttagaaactgtggtctccaaagcaaacgagcaatacagctacaaggtacttagaactggcaaagactgtgaaactgttaaagtagaaagtctcagaggtccaatagtgatgcgggatgtttgcttcaagtactttaccacatttctgaaacaaaatatttactgtcaattaataaaaattacaattcataaccactcaaagaataaagcaattgataagatgctatcaaactgacatccaaagttagggggcagtaagaggagcagcctgctctataataaaatgatatcagcaagtcaagacatttgcttttggggatttttacattttatttcatttcaacctcagtttttgttggcaagcagcattcatatatcatatgacttctacaactaaaatgaagctattagcactagtatttagtaatctagtaactctccttccagccctcttcaccccatgtatgtttatcacatgatatacacaatgtacatttacctccgtaagagtaaacttactcagttatagactgccacttctgatcttgttctatcgggtttaaagcagttgccaaacaaacagaacttcttaacaatggaacttcaatggatttctgaggttcccttggatctggacttcacatgttacgaagcagttttttcatgtctacagaagttaaatgaaatgtcattaagttaatgtgcttttattataaattttgatttatgtttggcattattaagaactaatcaccaatgaacagctcctttaatatttcaggcagttaaacactataagcattactgagagctatataaaaatcatacttcatacaaaattactgtacctcagacccctaaaaagcagttgccttcaaaggctcaaaaatcactaagtcgaggtcaggtgtggtggctcacgcctgtaatcccagcactttgggaggccaaggtgggtggatcacgaagtcaggagttcaagaccagcctggccacgatgatgaaaccccgtctctactaaaaatacaaaaaattagctgggcacggtggcagacacctgtaatcccagctactcagggggccgaggcaggagaatcacttgaactcagagggcggaggttgcagtgagccgaaatcgcgccactgcactccagcctgggcaacagagtgagactctgtctcaacaaaaaagaaaatcggtaagtcaatctactatttaaggggacaaatctagacctgcattagcaagtcttgctcaatccagaatactcattaaactttttaataacatcttatcaagtgttccatttgtgataaagaacttaatgagccacatcaagatgaaaatcaagaaaaatatttagctgaaacactactttgtcctttatcaaacaaaatggctagataaatctcaaagtattaaggtggtcattttttttatttgacttaattttaagtgcttttcatttcccaaatcaaacataaatagggcagccctaaatttgttgcttcacatgggattctgcccccacaaaaatgtaaaataacttccagattttccagtaaaatatactaagccaaacattttgagcaacttgtccactaaaataactttaaaactattttctcaaatacctacctattttttcttttgaccctccagcaagtagattgatattttctcctggtaacaattctaattgctcggtacatttgacaaattttccagactcaaagctgcttaatgatctgtaattaaaatattgcttagcttgtattcctatgcagcctgtggaaccattaaaaaaaacaaacaaacaaaaacagaacaaatcctaggaagacagcaaagtacacagcatttttctgacaaaattccttccacgaggatgccattattttggtttttatgttgaagatgtgactaccacttaattagtactcaaattggagtggcaaaccagaaagtcacagctacagactttcagtggagctgactcgcccctgtgtctccttcctgttttcatgtgttgcagcctgttctcttcagagcctgacacactgacagtagacctctgcaggacaactttgacacccagttctctccaagctgccagtgagctccctgtgcagcctcactcctcacctacagcatgagcccttgcagctctcccagcatcacaatcttgtatctcagtcctggcttctttcactgctggcatccctctgtctctccctttttcacctacttttcttttttcaaagaattcttctctttcatctgcttatatgaaaaataatgacacctctgaaattctttcctgtagttctgcagcatcaatgccaggaagacaggcctcatcctcccagcttctatgctgctcctttcagatcccttaccctgtccccattttcatgacacgggctctccagccaggaagaagacactgtttctcactctctcttttccatctttgcctgtccctctcgctgtgtaacttcccttataactcagcctgaggccagtgctagaaaggcacatcacctgacttattctgtgcctgattctacctagatcagtgcaaccactggcttctcagggggacccttgagtactgggcactgatgaactgctgccaacacagtcatcatttctgccattaaaaggtcctaagtcctctccagtggcaggttccccaagtccccactatgctctataatgccctatgctttcagctaatgactcagtcctcagaaaaaacaaacaaataaacaaaaaaacacaggctttaatttcctctacccctacccccaatccaccatacactgccgaaattctgtctataccaactttgactgctttccttgaggcagagaaaaggtgagggccagttaatctatcaatgttctttctcctgtttcttcaacctctgctttctagtggctccttccccttggccaaaagaacataatctctccaacatttaaaataaacatctcatatttccctccagcaacagcttcctatcctcgacttcaagaaaaactcactgaccaaataacttacctcaagcttttcattttcaaatgtctctaccactcaatactattcaatctagcttcttctgtctctctacaaaactctttttccttataatccctagagcatctgacaaggctgactactcccatctggatgtcctatatctagggcacttcccttctcaatgtccctgttatttttttgaatggcttcctcttctatcctttcacaaaaatgctaaactaggattctgacccaggccttccttcctcttcactcactattctccagaggcttctctctggtttggttgcttacaaaggctctagagtatagagactgaaaaggaaagagggccttttctgtgtactaatcatctgcaaatctctcaagcttagactgtctccttagttcaaaatccaattcttaacagcttacccaacaatctcatctgcacatttcattagaaatcttaaaacatggcttgttctctgtgtgctcctactccagttaatagcattgtttctcttccctctaccattgcccccataaattaatggtctccatgcttccatacttgccccgcacctccagtctcttcaccacagcagaatgaaccaagtcagatcacaacacatctctgttcaaatcccacctgaaattttcagtcttactagaataacagccaaagttcttctcagttcccagctacttctctgcccttatatcctactgtttaaggcgctcctaaacacacaggcctcccagctatttccagaacactccaagcccatcattctcacatcaggtctaggcccaaagggcatcctgatgggcatgtcttgaccttgtgtcttccctccaaagaaggtcagctttacctaactgctttccttatggcacagaaaaggtgagtgaggtccaattagtccttctatcaataatctttatctaatctttgctttaaaaggttggaatttgtgtctgttttatgtgctgcctgggtcacagcacatgctcagtgaagcaattacacattaacccatttagcagtagaagtatcagacaaagtctaatgacctttatcttcccagccaagtgtctgcaacagagtgctcagttttgaattacagaattaataaaagcacagaggaatgagaagaaagtttaatttacagatgttcacaaactctgtcctcattagaataaatgtttttgatatattcagacctcatttagaaacaaagccatcaaatgtgattctttctaaagcagtacaaatttttctttatattcactctggcataatcttcaaactgtattaaggttttagaacaacaggttctgaaaattaataccaaatgactatctcagcagtgttttcccattatacaaataccttccctcatctctgatgtcagtttcctgttgtcattttcataatggcagtaagttagaaatataaccattttgtattactacatatgaccaattttaatatttttttgccataggaaaaacatcgtagttattggaaatttgttttataactggaaacagaaagccttactttatatagttgaagtcagctttcaggttgaaggaagtgctactggtactctttttcaagtcatggatagcgttctgccattcctgcacagcagcccaatcggcaattgagatgtagcactcacatgctttatttcctaaataatttataacctcaggggaagagtcagtcggtttggacagcacagtttttctggattcacctgaaagtattttataaagtaagaagagagagattcagatcaattagaaatatttcaaagagcacagaaacctaaaaacatgataagatcatcagtacgaaatatattactataacttttgctttatttaaaaatactgaacgctcaccattcagacaatgtttcgggctggcactgttacacccagcattggctaaggtgagcaccgatttgtcaaagctggagatgcagcaatgaacacctatcatggcacacaggtgttcctggtactccacagaggccttttcaaacctgaaaagcaaattgaagcagtcttatttctttatttatctacttacttactttttttttttttttgagatgaagttttgctcttcttgcccaggctggagtgcaatggcactgtctcagctcaatgcaacctctgcctcctgggtacaagcgattctcctgcctcagcctcctgagtagctgggattacaggcgctcgccaccatgcccggctaattttcttgtatttttagtagagacggggtttcaccatgttggccaggctggtcttgaactcctgacctcaggtgatccgcctgcctcggcctcccgaagtgctgggattacaggcatgagccaccgcgcctggcctttacttacttacttacttgttttttgagacagtcttactgtcacccaggctggagggcagtggcatgatcatggctcgctgcagccttgccctcccaggctcatgcaatcctccaacctcagcctcccaagtagctgggactacaggcgcccaccaccacacctggctaaaacaaggttttgctctgttggccagggtggtctcaaactcctggactcaagcgatccgctcacctcagtctccccaagtactgggatttcaggcgtgagccaccgcgcccagccccaaaggaggctgttattttaaacacacatatctcatttcccccctcccacaaaaaatggtgcaagaataaactgagctaaaacagtgagttgactatggtggggggaggtttgatgtcttcctcacaactatgaaactaaatttaaaagtggttaaatgttttttaaaaaatgtaagagtataaaagaactagtggaaaatattgataagtaactgatgtcagtgtgtggaaaggctttgtagaaggataaaatgcaagaaaagatgcacaagtaacagcatctagatgcataatgctgaaatacaacactaaacattaaaaacaaattataatcaagaaattggatagcatcaacaatcttagtatttaatgaaatttcacagattaacacaggaaaaattgagaggccatgaagacatgatccatgttttaaaaaatcacaaatggtcactatatggggcaacttctactattagtcattaatacatatagaaatgtaaagtacaataactattttcgctgatggtggtggcagcattcttgtttctcagtgactctcagtatccacaaaggtgaagggaagggggtactctattattaagggtatacattgcagccatcttttctgtagagtaacttagcaatagaatatatcataagacttatggtttggcagcctttcttctagtaaatcagtttatgagaatggattccaagaaagtaatcagaaatataagcaaagatattaagtgctatggtacatttagtaaaaaaaaaaaaatcagaaacaaccttaatgcccaacagtaagaaatattaaattatggtacactcataaatacaaatctttattaaaaataacactgtagaatacttaacatggcaattttttttttttttttttttgagacagagttttgcttttgttgcccaggctggagggcagtggcacaacctgggctcacagcaacctccgcctcccgggttcaaccgattctcctgcctcagcctcccaagtagctgggattacaggcatgtgccaccacaccccactaatattttttgtatttttagtagagacggggtttcaccatgttaggctagtctcaaactcctgacctcaggtgatccacctgcctcggcctcccaaagtgctgggaatacagatgtaagacaccgaacccagcctacctaacatggcaaattttttttttaaatattgagtgggaaaaacagatcataaaaccatgtgcctatgtatgctgctgttttggtgaagaatggagaaaacgacatgaaagaaaaaagaattacaaagcatatggatatggaaatatgggactacaaaaggacacacaacagaagttactacaaagatatggaagaatgagcagttcttttattttcctaaattcgcaagatttcattaaactaacataaatggacacagaatattatggtacaagctcctctatctggaggaagcaatgagtctgaatgtagagttcacaggactaatgagcaaatactctgacaataaagggtaatttgtatcagactctgagggggaaggagctcaactagggatcaagttcaaaagcatttataaaacaactgacaggtcttgtttttcagtgtgatttgccactaattcttaaataagaaaggcactcaagtattgctgctaactaaagaacaaactgaagatgcctcctggtgaagtgatttatagcaagcttcaatgctgaaagcaaacaaagctgttttaagatttggctacaatgtcagtgagtaatacaaagaatttaaacataaagtaattctatcacccatttccttccctccaacctacctcccttcagcctgttgagccactgagttaatccacagaagattttttccaacaatagatgatgaccagacagcaattccctgtatagcttcaggacaatgaagttcacatagtgcttctaccaccatcataatggttacttccaattcattcccctgaaaacgcattcagaaaagttagtcacccaataccattaaaacataaatccctataaaatttacaactgatcacagtctgtgcctgcttaaagccaaatgtatttaacaattattttcacaattttcacattatttagctcagaattctttaaaatgttacatataaaatagccacaaagggtgactaacagaaccttagcagcacatggatgtttgcacccccaccccaaagttacccaaacatttaacctgtgacctctgtaggaataacacatggagtaaaaagaaagcaaaaattaaatataaataaacaggaattaaagaatgattaacttcatgtgtttgaatactgcttgacattacctgaattgctaaacattttgttatttttggattccagttatttattgtgagcccactttcaagccaggaattactcaagcatttgtcatacgttataaaaacaatttctcctggccaggtgcagtggctcatgcctgtaatcccagcactttggaaggccaaggtgggcggatcacttgtggtcaggagttcgagaccagcctggccaacatggtgaaaccctgtctctactaaaaatacaaaacttagctgggtatggtggtgggtgcctgtaatcccagggactgaggcaagaagaggcttgaacccgagaggcggagcttacagtgagccgagatcacacaactgcactccagcctgggcgacagagtgctgtgtctcaaaaaaataaataaataaataaaaaatttcccccataaacaaattttcagaattacctttaaagttctaaactttgcacataagaaatatagttttaacatgttctaagatgaatattgttttaacatgaacaaaaacatgaacattattttaacttctaacactgttttaacacgaataaaataggtaactctggcagttgttgcttttacaaaatacaggatcaaaacctttgaaaatgaatccaagctttaacttattttatccatagattaaatcataccaaaggaattaaaccatgtttttcttattaacagacttaaaatgaatttcaaacacaccactttacctgagataggctggttgttttcatctctgtaagcaagtcaaagccatgtctcactgtcactgcaggctggcctgccaacaatcctaccctcatgatggagagtcgaatccgcgttagccagtcctgacaagtttggcgattggtatagaaaaaagttctagtcactttacgataagagaaagaaaagctcaggactggttcaatttgtaggtaaggatgtctcacctatatataaaccaaatacacaagtctattgtgatttcagctctgcacatactgccagctgtgaccattaaactgctataaaacaacactatctcatggaaaccaaccttgggaggtgaagttaatgcattagcacatccctcgtatgcattatacattaatttctccagatattccagatactgcagaagaagaacaagtctaagttggttgttaccatggccttcatcactgtctgcagttgtccactgactaacatcctgatcagggtttaatgtgtgagctgcgagacttcgaatgatacctgaaagcaaagacaacattctgaatttttaaaaatcttaaaagttcctagaataagtgtgagttttttatgatcaattcacatttatcaagtatcctctgtctacccatcatttaaaaataaaaaatcccaacatgaaagatctttcattttaggggaaaaaaatatatattttttccacacaactcccataagttttgggaaaaaaacaaacatatttccaatgcaattattcaatgaaagcttattctaacaaacatacctgaaaattactgacttcttttcaaaaaaatcatatactctcaaatctttaacaaagatttaaaaatccattatttcttaataaggctttgaaagtattcacatcacaaagcttgagcgagttaccttcaattgtctggaaggtgtcttgagctctgcccagtggggttctcagcttagaaagaacagtgaattgtgcagcttcccatacggcccactgccaaaggatagcatctgtcttcaggagattgcgtggaattgttgactggtcatgcttatccagtctctggcagctatagaacagtctttccaaccaattgtccttcctgggaaaagtagtttcatatttaaaagacaatgacaacttcattttaataatgaaaaaaaaatgcaaggggaatgggaataaggaactgtaattttccctactccaaaaaaaggcaaaacctatgaaattgagaagcattatgtcccccccctcttattttgaggtcttttatagttaacaggatgaggtacagcgtggaaggatgattagggtaaacggctcatgccggtcaggaatgaaactcattcaatgcaactaagcatctctagaatatctccacccccaccccattccccaaagtgttaatgacatcacatcagttaactgttaaccacatttcattactcaatttcaaagcccatttttgtttctacagatgctatcttcaaagtaattttcctattgatgaaaactgaaataacccatatgagaagaatgttacttgatactctgccacccccaaacatattttctcttcaaaactgcatgtaaagtaaagggaatcttaaaattatctttcctagataaaatagtcaaagaaatgccttaccctgttctatgagagttcccatacaaaataaaactaataacatcagagaaatcttgggggtggaatgtattacttggtgctttactcatgtgacttcttaatgctaaagaaatttcttgaatttctgtgtgattgttattgctgtagacagaaaataaagttgttgttacgcaaaatattttagcttaaaaggttagcacatactgtaagtggattatttacttattaactcactggaggtaaaaatatagaaaaattgagactttcaaatggatacggagatgtgattacaactttagatcctttttttattcacttcagatgggtcatgtgccgacatcataagaggatttgagggaggcatatcaaacatgtgaacataaaaacccaatcattatgcttatgtattacaaaaggatcaagtttaggctcttaaaagctcccaaatcaacttgatcaaaaacaataaaagattactgtttagtttttcaaatatctgagctactaagaaacatattttggcactacatgagttattctatactaattattgtgagcctataaagctcattaaaaatttttaattttcttgcagacctgcaaaatttgattatttgacatcacttcaatcactgacaagcagggccataaaagatgtgtcattaatgctctaataggtgatctgtcttctcctaaagtagacaaccagtagaggctgtaaatatcacagaatgtctttgctccaaaacaactgttataccttaggataacatctaaaggaattgatttcaacagttttccaaatgcttgtcgaatacgagttccacagtgcactagttgaacatggcaaacatcaacacatctatgaaagaacgaaatagacaaagcaggtgtgttaacatttcaaagttattaggattaatgtcaaaagacatgatcttaatttcatacctctgtaaaagatcatctggcaaggaagaggacagagcaggtagactgctgcatgcctgcagacagatattcacatcttcaacgagaactattaaacattaaaagacagctactttcagctggccaaaagaaattatatcccagtttgtcataattatctgaatccattcattcattcaacaaagagtgagtgcctactctagactaggcactgttcttgtccagaatcctcattgactgtcatgtttggaaaaatgacacattcaacaaaacccacgtaatgtaactgatgggtcatcacacaaaactttttctgagagaaaatgtaaaagtatatgcaaactataaacattcacgtaagcttaaaaatgtgacaatcacttcaaaacatttttctaatactaagaatgaaaaaaaatcaagactgtgtatctgtcattaaaatgaggattacacatctgcaggtcaggaaaagagctctattgatgaccatctcccattaccaaggattgataaacaaaatagaaaaaaaaaaacagagtcttactgttggctaaaaggcctttgcaaaatttatggaaagacggaagacagaataaaggtgcatatgtttcggacttcttcattaaaacagctacttccaaagcccaagtcattaacagtttcctgaaacacaaaatatacagttgactgtacattaaaaacaataacaaaaacaaaaaaacgttaaaagcctagtcttcttacattggttttctcttggtttttcaaatatctcaaacaataaaaaataaaaataaaaaatgaaactatagaaattactgtcaaaattgttgtgtgccttttaagaaaacctcccaacgcagcatgataatagcaaagaggccgggcgtggtggcttacctgaggtcaggagttcaagaccagcctggccaacaacatggtgaaacaccatctctactaaaaatacaaaaattagctgggtgtggtggcgggcacctgtaatcacggctacttgggaggctgaggcagaagaattgcttgaacctgggaggcagaggttgcagtgagcaaaactccgtctcaaaaacaaaaaaagcatagaatattaaaaatctatatatattcttctatgaaacactgggggtgggggattgaggtttttcatgtatttcttttcagaaagaataagaaagcctagattaaataataaaaccaaattataaggtgtttgacagtaaagaagctgctctacctcacctctataatccacattttttaaaattttttgtaattcacatttcttattctcaaattataaaggcaaattaacaaagttaggaatagttaatactatataaaatctgttacctcgtgtcctggttaaggttatctttcttaagtaatattcacagaagatttaatataattgagaaatgtttctttgtggccgtagttacagtgctaatcacagctccatcaaacaaagaaggagaggaagaactgaggctactagagataaagtgatcatgcctgaaagacaaagcatagattatcttttcatctttaatcaaagaaagcaagcaagtccaaagttaaatcaacatacatctttaaaatctatccattaaaaaaataaaatgttttgtggggttcttaagaaaaatttgtgaatacagtacctggtacaatgagaatacaatgtgtagagcacagcatactgaatggcagggaagtgaacagccaggtcactgtgcacaatcatcagattcttactcagaagtgcaaagacagttggagatagcgcccacatctgatcatgtacaaaacaaagtaagtttatggcttctccaaaataagcacaagcatacagagtttatccttcaaaacaggggtatttggactttttttatttggacatttttaaattaaaattacagattggaagggatctagtacactacaccttggacaaatacttttttgtgaagtcagtaaagcctttgcgtgcaatatagcatctctatgcaatgcagcaactccttgtctatcgctacagtaagaaaacagccacaggtcaggtgttgtggctcacacctgtaatcctagcactttgggaggctaaggtgggcagatcacttgagcccaggagtttgaaaccagcctgggcaacacagcgggaccccatctctactaaaattacaaaaattagctgggcatggtggcgcacacttgtaatcccagctactcgggaggctgaggcaggagaatcgcttgaacctgggaggcagaggttgcagtgacccgagatcataccaatgcactccagcctagatgacaaagttaagactctctctctcaaaacaaaacaccagccacatacgaaacacaggaatgagagtacctgtgttccaagaaaactttcttgagtcggagtctctcgctctgttgcccaggctggagtgcaatggggcgatctcagctcactgcaacctctacctccggggttcaagcaactctccctgcctcagtctcccaagtagctgggactacaggtgcccatcaccacgccctgctaacttttgtatttttttagtagagatagggtttcaccatgttggccaggctggtcttgaactcctgagctcgggtgatttgcccgtctcggtctcccgagggattacaggcgtgaaccactgcgcccagcccaacgagaactttctttacaaaaacaggcactagtgttgcgatggttgtacacttctgtgaatatactaaaaatcagtgaattatacacttaaaataacaaacaaaaaacaggtgctgggctgtatttggcccacggaccatagtttgctgatctctggtctaaacagagccctttgtatgtgccttttgcggaagtagactgtatttcttcaattttccatatactgcaaatggcaaggtgccctgttcaataaggaaacaaaggcacaccctgccactatacaccttttccatccatcttgttcctttacactgccaagacactccattccacctgactgccccagccccacccactttctccttatttctagagtacaggacataaacatctttgaatctgcaaataatgtgaataattttcctcaaaaatcaagctttcatgtttgaagaagagtttattgtgacttcaaacataagctgtaactggtaataagcgaagcagctatggaattatacaaggcaatccaatcaaacaacatggagcacactgaagcgcaaacatcaaattttacctttttcctcctaaaaactttattccctaattacatccattactttctttctttgtttctttctttttttttttttcttttgagacagagtctggttctgtagcccaggctggagtgcggtggtgtgatctcagctcactgcaacctccacttcctgggttcaagcaattctcctacctcagcctccaaagtagctaggattacaggtgtgcaccaccacccctggctaatttttctatttttagtagaggcgaactttcaccatgttggccaggctggtctcaaactcctgaccacaagtgatcagcccgacgtggcctcccagagtgctgggtttacaggtgtcagcaaccgtgcccagcctacacctattattttctattaaaaataatgtttttcaactctgtgtggtccaataggaagaagaaatacacaaaccataaacaataaatacaaatcaagagcagggccacgtcgaattacttaaaaaaaaaaacacacgggctgggcgcggtggctcgtgcctgtaattccagcactttgggaggctgaggcgggtggatcacctgaggtcaggagtttgagaccagcctggccaacatggtgaaaccaagtctctactaaaaatacaaaaattagcccgtcgtagtggcaggtgtctgtaatctcagctactcgggaggctgaggcaggagaattgctggaacccgggaggcagaggtggcagtgagccgagattgcaccactgcactccagcccaggtgacaacagcatgactctgtctccaaaaaaaaaaaaagctttttttttcccccctcctaaaagaaagactacaggttgagtatcccttattcaaaatgcttgggaccagaagtgtttcagactctgtatatgtttggatttgagaatacttgcacatatataaaatgagatatgtgggggacgcgacccaagtctaaacacgaaattcacttatatttcatagacgccttctattcatagcctgaaggtcattttatgcaatattttaaataattttgtgcatacaacagtttggactcatcacatgaggtcgggtgtgggattttccacttggggcatcatactggtgctcaaaaagtttcaaattttggagcattttagatttaggattttcagattaggggtgctcaccagtaagtgttatgaaaatattccaaaatccggctgggcatggtggtgcccacctgtaatcccggcattttgggaggccaaggcaggtggatcacctgaggtcaggagttcacaaccagcctggctaacatggtgaaaacccatctctactaaatacaaaaaaattagccaggcgtggtggcgcatgcctgtaatccgagctacttgggaggctgaaacaggagaatcgcttgtacccgggaggcggaggttgcagcgagccaagattgcgccattgcactccagcctgggcaacaagagtaaaacactatctccaaaaaaaaaaaagtattccaaactccaaaatcaaaaacacttccagtcccaagtatttcagataaggaatattcaacctgtatgaatgttcctagggaaaaaaagacagccaaaatataagaccatgtataagaactaacttcagtagacagaaagaaaaaagtaccaggggaagaaagagaccgcattttaaaacaactatacaaatttgagctgtaagaaacactgacattttctataagcatgctagagcaaatgggagaaattcataagacgttttctagaaaataaaactaatataaaaaaacttatcaagatttgtcaaggaaaaagaagaaacgttaaatataatggcaagaaaacattcctaccaattttatttatccaggcatgtcttaaatatggctgtttgttacatacagtgattctgcagacatgttgacatgacagtgaaatacataaatatgtaatgagaaaaggcttaactgtggataaaacaaagtcattacaattaaagactcgagtttttggcatttccagttgtagtcagggcactgaggtcaaatttaactacaaattttgcattgtctacattgaacacatgattcttaaaagcctcatgttttatttcagaacaggcctcaggaagttgcagactgtgcaggaggttgtttagggcacaagtcatttctcccaatattaacttataggcagtctccaaaacaggaatattcttcaagctgagcattgcttgataaacagcatgggctacagcaacaacctgaaaaacaaaaaattcaaggaagtgataaatggaaaataaatcttctaaaattatatggaaaataaatcactatctgtattagtgctgatgatacaaataaatttaagattgatcaattcactgtccgtagcacttaatattttaatttttaaaaaaccaatcagaaaactgacacagatcagtaagctatttcaaatctattaagttttatcacaaataaagagtactataaatgaaaactgtcaataggaaatttccaaaatggccgtttttttttttttttaaataatcaacatcaaaagacatatgcaaacagcagtttaagactgggtttcttaaatctaccaggaaagtctgtggtggatttgactagggggtggttgaaaagccagtcatttttgtttataaaatatacagtacttaatttataactttataaatgtgtcaacttgttttacccttatgaaaatttaataaatttaataacagcaagagatgcataatctgaaaagagtatctggcacatcattcatgaaagtattcagtatgattatcaagaaatataaatttaaaagaacaaatacaatcactatattctaaatcaaacatttcacatttcactcaatttcacttatatagcctggtaagcaacattaggtccaactcttcagtgactcaagttgtcaaaattcattatcagtatattacttacctctttttctttatgataacgcaagaatagtagtttagatgatggtataaacagtttttctacaaatgatgatggcagtttcgtatttatctgttcaacaatctaaaagaataaaatttttaaaaaatgagcttctcaaattacaaaaagacatggagaaaccttaaatgcacactggtaagtgaaagaagccaattgaaaaggctacatactatatgactccaactacatggcattctggaaaaggcaaaacgatggagacagtaaaaagatcaggggttgccatgggcttaagatggagggagggaggagtggggagagggaacgaggaaggagtgggtagaacatcaaagatttttagggaagtgaaactatcctgtatgatactggtaataggggatacatgtcattacacatgttaaagtccatagaatacataacacaaagtaaactataaaattagttaataataatatatcaatattcactcctttgtaataaatgtaccacactaacacaatatgttaatgagggggaaactgttgggatgaagaaggtatatgggaactcattgttttctgctcaattttctgtatatctaaaaaataaagtcttttaatttagaaaaatatatctaagctatattttaaggccttaatactgtgacattaaagtgtttagacacctaaataggacacacgtattttacagttatcatgggcattttttcacattagcaaagagaggtgtaaatctggcagaaatgctcagcagaatgtcatctagaatttgctttaaaataatccagctggagatgaaaggatagcaaagaggcctagatgaaaccagatgggccatttgtttctaattatagaagctgagtgttaaatatgtacaaatttattataccatgctccctatttttatgtgcttcagaatgtccataataaaagtggggggaggatatttatggttaagaaattaaaggaggccggccgggcgtggtggctcacgcctataatcccagcactttgggaggccaaggcaggcagatcacgaggtcaggagatcgagaccatcctggctaacatggtgaaaccccgtctctactaaaaatacaattgtgccactgcactccagcctgggcaaaagagcgagactccgtctcaaaaaaaaaaaaaaaaagaaagaaattaaaggaggccaggcatgattgctcacacctgtaatcccagcacttcgggagggcaaggcaggaggattacttgagaccaagaatttaaggccagtctagacaatgtagtgagaccccttctctccaaaaactacaaaggttagccaggcatggtggcatgcatctgtagtcccagatagtcgggaggctgagtgggagaatcacttgagcccaggagtttgaggctgcagtgagctctgattgtaccgctgcactccagccaggggaatacagcaagatcctgtgacaaaaaaaaaagaaagaaagaaaagaaaagcaaaaaagaaagaatctggtgcatagagcaatgtttcctcagaaaaaacgagtaaagctacactgagactagctatcaaccactaaaaatagaggcctggcagagtggctcatgcctataatcccagtactttgggaggccaaggcaggtggattgcttgagcccaagaattcaagaccagcctgggcaacatggcaaaactccatctctacaaaataatataaaaaattagccaggtgtggtggtgcacgcctgtagtcctagctacctggggggctgaggtgggaggatcacctgaacccaagaggtcaaggctacagtgagccaaaatcatgccactgcacttcatcctgtgcaacagagtgagaccctgtctcaaaaaaaaattgcattaaaaataaaagtaaatagacactaaaatgaaagcatagattataagactgatgaatgtactctaaaaaataatataataaagcaaagcccttattttttttcttttttggagacagggccttttttgtcaccttggctgagtgcagtggcacaatcagagctcacttcaacctcaagttcctgggcttaatcgatcttcctccctcagcctcccgagtagctaggactgcaggtgcacaccactacaccaagctaatttttgactttttgtacagatggggtctcactacattgcccaagctgtgccagaattcctggatgcaagcaatccttctgctttggcctcccaaagtgctgggattacaagcatgagccaccatacccagacaaagtccttaatttcttacatatcgatttaagggcctgaataaaccaacacattaaaaaggaaaagaataattcacataccagcgtgagtaaattcaagactgagatgatataattggtaccacaagtctggcaattctccagttggtctaatccatatgtaatgaccatgtcacaatgtatagtcatgctaggatccaagctgccgagcaaaacaccaacacactcattagcagctgtcaacacagcctcagaaaaaaacacctggtttgcagccgtcacacatctcattactctgtacagaacctgtaaatggggaaaacaagcagctttttacaaaaattcacgtgcttccacaaagcaagaaaatactttttatttaatgcaatttcaactgaaaattaactgcttgccttgccagcagtctcttaatattctagttctcagtagctgaataataatgatccctttactacaatatgtaaacatgatcttggctaaaaaatcctaaagtgctactatgacaggaaatggaacctgccatcctctatttcccatatacccaacttcgtttctcccaatgtcactaaatggctgaagctcagaatctttatcatgaaatacaccacgacagtaatggtattgacagcatgggaatagcctgcccacacatactacaagctagctcttgggcttttgggaatcaatctttcaaaactgaacatacaagtcactttaagcttattaaagtttctatctactgatggtctcttttgaaagataagcactctcatgcttaccacataatatcttcaaaaatcatattatttccaatacacacacaaacaaaatcccccacttaactataatggccaataattgtgtactaaatttctaataaaatgggggagaaaacagagcaaatgtttaaaaatatttctataatatttaacaaccaatacatacaggattttatttagtctacccatagttttcattaaaagtatccttggaggttgggcatagtgactcacatctatcatcctagcactttgagaggattagctggaaggttctcttgagtccaggagtttgagaccagccatgtcaacataacaacacctcatctctaccaaatttgtttttaaattagttgggcgtggtggctcacaccagtagtcccaccaactacttgaggctgaggtgggaggatcacttaagcctgggaggtcaaggctgcagtgagccaagatcgtgccactgcactccagcctgggcaacagagaccatgtctccaaaaaaaaaaagagtgggggagagagggcggagggggaaccattcttggccatgcatgcacagtggctcatgtctataatcccaacactttgggaggctgaggtgggaagactgcttgaggccaaaagttcaagaccagcctgggaaacactgagaccccatctctacaaaaataaaaaattagcaggagctgtggtgggaggatcacttgagcccaagatacagaggctgcactgagtcgtgatggcaccaccccactttaaaaagaaaaacaaaaaaagctgggtatggtgacacccgcttgtagggctgagtgaatgggaagttcacctgggcccaagagttcaagactacagtgagctatgattgcactactacactccagcctgggtgacagagtgaggctccagctccaaaaataaataaaaaaaataaaaaccccaccattctaccattctcaaaggcctaaaagatcctcataaatcaatatacacctatcctataaattatgtcccttttattttatgtctgaattaacggctttttatttcaactctgtacagtcttcaaacaaccaccttttagacattaaaaatgaagcaaagatattaaaccattttgaaaccatattggtttaaaataccaatatgctggtttcatttatctttaagttctgacatttctgctcaagtacacaacttactatataatcaatatcctattttatttagcaacatgttcagcaaaagtatatgctcctaaaagcgagttttatcctaacagtaaaattttcatcagttagattaaattttttatgactgtatcacacatgcttctttctccttattcaaagcagagtacaatgcctggggttcacttcttgtgtcttttccactgaaccctcattggatgtgctatatacagtgcagctaatgtttgaggctgctgaagtgtggcaatctagctacctcatttttaatttgtttatgttctttgatatcaggctatcaaagaatataaagatatacaagttttcatatgagttccatcttatgctcagagaaggttactttctgaggcttctcctatagtgtgctattcgtaatatgttgaaaaactaaaaggaaacccaataatttaaaagtaaaattataagatatattatttaaaaatgaaagaataagatttaaaaattcagagtggccttttgtcatgggagggtaggggagttggatgaaaggaggatgagatataacaggattccctgcttttctggttatttaagaaagcagtcagacaatatatacatatatacatacatacacacatgctaaacaaatgaaggattaataacagttcacctggtaaagagaatcatttacaatgtaaaacaattttatttttgaatgacacttcaaatgcccaaaagcacttacaactgttacgtatgcctcagtaattggaggacccgaattgggctgaagcgttccccaatgctcctcagcacagtactaaatacccggagaagcgcagccagctttggtgatgacactgatggaggagggacgtcttcatccactgattccccagaggccacatggctgaggtcctagatgtgaattcacagcattcttaataagtagtacattgtttaaaaaaaaacaaaaaactctaaaatatttcaatcaattcattttagaatagatttttaggcttttagaaagagaactgtggcccatgagaatattcatgactctgaatataaaaatgggttttacctaattatttcaaaaagccaacattaaacccaatagacaacaaattaaggaaataatctcttaaatcaactcagaaagctgttggggaaaaataaattctagcacatatgctctagttatatgtaggtataaatgaagacggaagcttttgccactcctgaattagtttttggctaaaaatctcattctaggtattctttgagccactcagctcaacagtaagtcctccaaaccaagagcatgcacatgaagagcaaagggagattacaagacctggtctacagatgtgtaactgaagaagtacgatatatgaaaaggacaagattcgcaaaaactaggatactagaaccaatgtatacatctacctaaaattaagcaccaaaataacagaagagaatgagatcttaaggataacaaggggaaacatctctacaaactagaatgtgtggcttatgagaggtagatcagctttaaacgtgggctgtgaaaaaagacattctaggtgtgggggcaaagaaaaaacaacgcagaagcaaaacatttccttgcttttctaggaaagagtaaacacatcagtacagctaaaggtactgaattcctgttgactacaagcagcaaagatgaaaaaaacaagatgaggccaaaatctttatgggagccttgattggttgatctgaataggggagaaacacaaagagattcagataagagatggcacagagttaagccatgacagtgcggccagaaaagccaagtaccagtaacagaggcttcagcagcgctcttaaagctcctatgctatattcgtacagccacaaaagctggctgaagccaaggcttgtcctccaaagtacgattcaagttctcctgtacatatgtaagaggaaaatctttaggagcttttggtgttttgtgtttttttataacacaacatcaatttgctttaagactctgaagactggggacaaaaaataaaaataaataacaaaaaatgtctttagaaaaataccagctaccaagagtatgtaaagctttgcgaaatacgaagcttgcaacgtttcttttagtctctccagtaattctcctggtaatttaaacacatctgaaataaatgtttaaaatactgactgggcacgggggctcatgcctataatcccagcactttgggaggccgatgtgggtggatcaccagtggtcaggagtttgagaccagcctggccaacacggtgaaaccccgtctctactaaaaatacaaaaattagctgggcgtagtggcgggcacctgtaattccagctactcaggaggctgaggcaggagaatcatttgaacccaggaggtggaggttgcagtgagctgagatcgtgccattgcactccagcctgagtgacagagcgagactccgtctcaaaaaaaaattttttttcaaaatattgcgatgggcttgtaatttctgcttaaatgtcaggaggtctgagccattttaaaataaatctagcacaattttaagattttttcttaaccaaaattttaagaaacagctttctatatactcacctcagcatatgcttccatgtcttctagaaactgaccaagaagagtcgtaggaaatgcaagatcagctacccaaaatggctccaaactctgcaaccacccttggaatcgtataagaaattgtgaaagggtaggggggagaaaaaacaccaaaaaatccaaattaaaaaaatataagaggctcgttttaaaaagtatctggttttcaagcagcataccctaaaacatgtcctatatcataaaattaagactgctaaacatgctgatcacgattaaccaatacctctttaatacctctttaatttctgcagaaattaacttgtaaatgttatttccttactttttcagtaaatttcatatctatattgtcactacacatgacttaagactaaaatgccacaatctaccattggcctggctaatcccagggccacatctaaccattaaaggtgtatactcatctcctcagtgaaaatgaaacagaccactatcacctgaatatcctattttcaaaagtttattacaccaagtaagttacgagaaactatgacacttgaaacaagctgaaatgtgcaaatgagccacgctagtcattcacttaaatccaaaaaaatgggaaacaaaaccatttctcatttatgacaattctccaaattaaccctatatttccttttttaaaaaaataaccagaaaaacaataaaatgtgacaaataacttggatcttccattgtccacttcagggtattgccactgcaatatattcttaccatatactttcctaccagtacaaactacaaataacttgggtaagtcctgtctgtacttactctacccacctactagtaatttcctctgaaaatatatatttagctaacaagtcacgttcatttacaataaaacatttctctgaattagttttcttgcattattaaagaaatggtattggccgggcgcggtggctcacgcctgtaatcccagcactttgggaggccgaggcgggtggatcatgaggtcaggagatcaagaccatcctggctaacaaggtgaaaccccgtctctactaaaaatacaaaaaattagccgggcgcggtggcgggcgcctgtagtcccagctactcgggaggctgaggcaggagaatggcgtgaacccgggaagcggagcttgcagtgagccgagattgcgccactgcagtccgcagtccggcctgggcgacagagcgagactccgtctcaaaaaaaaaaaaaaagaaatggtattgatagatggtcactgggggaccactgctcctccccgacagtatttaaataactggtataggctgcaagacttaccagatacctgctgcgtgagcgaaggtttctgagtatgatctctatgccatccaactaatatatcaactgtatccttgatggaaacaaagagagagggggccaatcattttaagatattactgccattcacctgtggaccatttcacagcaaaagatcctaaaaggagcatctatgttctacctacttgacattctagaaacttagaaaggggagaggggcaggaaaataaaagaactacatttctgacaacaatgaaatagtttattttcttcaaatattttaaggtacgaacgtcagaaagaaaaatgcggcatttaaccctggaacctcaaatatcactgattatattcaaaggagcagaggcattgttttccatctgattcctcagttcctcacacacacaaccatccccctcaccccatgatctgaacaacggaatgaggaactcaccctaaaattagcgctgaaaatatgagggtaacatcgagccaccaaaagaatgcacttaacacatttgcaaagcaattctggtgtatccacattttcaagaattgactgcaggctggtcattacaagcttaaaaataaaagttacaaaccgtgaacattcaacaaaatagggagaaaacaagcaaattaggttcattatttactgactacataaaaaactgagtatgagaccaagaaaaatagattctgtagttttagttaaaaaaaaaaaaaaattcacttgtaaatcccaactgcttgggaggctgagacacaagaatcgcttgaacccaggaggcagaggttgcagtgagctgagattgcaccgctgcactccagcctggacaatacagccagagtccatctcaaaaaaaataataattaataaataaataaataaattgaaaatatttcgctccactaagatgttaagctaaaaacaaatactgctttctcctcttcaatgtttgttaatattagtcctttgacatcagttaacattagtccttaataacatctgtttacaatatccctaaatgctctctttaagattctacctgtgattaaatttcaaatacaaaaaagtaaaatggatttgggaaacttttctataaagtacaacaattactttgcaatccaaaatataaagcaaattttatataatttatgctttagtatattagtacttgcttcatattaaaattaaagaagatcagtatggcaccacacatgaataacatgcaggctcaggttaccattatacataaatttttaaaataaatatatggcaaaaataaaataataaataactatttgtcattccattgaaagaatatttattttgcagctgttaaaaaacatttttccctaaaaaaggaaaagctgcgctttacatagcaatcttataaaagaaatgctagaatcagaaaaccatcattttacgctgggtgcagtggctcacacctgtaaccccagcactttgggaggacgaggcaggtggatcacctgaggtcaggagttcaagaccagcttggccagcatgatgaactccgtctctactaaaaatataaaaattaacagagcacagtggcacatgcctgtaatcccagctactcaggaggctgaagcaagagaactgcttgaacctgggaggcggaggttgcagtgagccgagatcgcgccactgccctccagcttggacaatagagcaagattacatctcaaaaaaaaaaaaaaagagaaaaagaaaaccattattttgcaatagccaatgttataatctacacaggcacagactatcaatgctaaaaatcatttaaaagacatcttaagggtaattacagaaatttgaatatagaacacatatgtaataaaattcattttcttaggtatgattacaatattcttgttatacagaagaaaaaccttattcttgggagatgcatactaaaacattatggggtgaactgtcatcatgtatatggttttcagatgctcaacaaaagtgtgtgagaaaataaaactgtggcaaaatattagtaactggtaaatctaggtgaagcatatattatgaaattattatcgtatttacaggtatttattttactggtgcatctatctttctatgaatgtgagaattttcacaagagatgggaaaatgttcataattatgcatgcagaataagcccaagctggtggcattctgttcagttacaggtaattttctgaatcctccctcaaatttttctcaaacctctataatcaagggggaaaatgtttcgttttgttttgcttttttgagacagggttgcctataatggagtgcagtagcttgaccacagctcactgtagcttcaacctcccaggcacaagcgatcctcctgcctcagcctccaagtagctgggattacagatgcatgccaccacgcccgactttttttttttcctttttttgatagaaacagggtttcaccatgttgcccaggctggtctcaaactcctggactcaggcaattcaccggcctcagcctcccacagtgctggggttacaggagtgagccaccatgcccagttaaaaatacattttttatttaaaaaaaaaaaaaaagaacattccttatatttcctttatattttttaaactacatacccaaaataaagcatatcaaaaactgtattaaaaaaaaaaccctaatatcagatattccaaacacaacaataccataatttaatcacttaaaatcttactcaaaactaaatcaatgatcttttaggccaggtgtggtggctcatgacactaatcacagtactttgggaggctgaggcaggaggatcacttgaggtcaggagttcaagaccagcatggccaacacaatgaaaccccatctctactaaaaatacaaaaattagccaggctaatggcacactcctgtaataccagctactcgggaggctgaggcaggagaatcgcttgaacctgggaggcagaagttgcagtgagccgagatcatgccactgcactccaggctggacaacagagcaagactctgcatcaaaaaaaaaaaaaaggaatgatgttttaatatattcagatacacaaatgtgaaataaaactaagtagagctggtattcatttacacataattatcttataccatttggaataagaatttggggcacgttagcaaaccaaaaggctcagaaagaagttgtgatatttagttcttgtctccctctacaaatgtgaagcactcttctatccagcattcctagtggagttcctattttcaaatttgcaaatcattctggtcctaagcaatctcaaaaaaacatttctaaaaaccaaagaggaaaaaaatccttttttttttttttttttttttttttttgagacagagtctggctctgttgcccaggcaatggtgtgatctcggctcactgcaacctcggcctcccgggttcaagcgattctcctgcctcagcctcctgagtagctgggactacaggcacgtgccaccatgcctggctaatttttgtattgttagtagagacggggtttcaccatgttggccgggatggtttcgatcccttgacctcatgatgttcccacctcggcctcccaaagtgctaggattacaggcatataggccaccgcgcttggctgaggaaaaaaatcttaaaactaacttatttcaaatctaacttcaacgtgtatctttttttttcttttgagacagagtctcactctgttgcccaggctggagtgcagtggcgcgatctcgactcactgcaagctccgcctcccaggttcacggcattctcctgcctcagtctcccaattagttgagactacaggtgcccaccaccacgcccggctaattttttttgtatttttagtagatatggggtttcactatgttagccaggatggtctcgatctcctgacctcatgatccgcctgcctcggcctcccaaagtgctgggataacagacgtgagccaccgcacccggcgtgtaagccaatttcttagaagaaatctctccctctttctccacatatatgcatatatgtatgtagcactaatccttgaacagtgtatcctttactcaaactgagaaagaggaatttttaaaacatatttcctatcagtagataacccctattctatgtttcccttcttcaagctcccctccaaggacatgtgttaagggacaattttcttcccaagtacatcatgcatttttcccccttcattcttacctgcattacagatgaaaaggctttcttttctcctacagtctctagtgctttgtaggtggcacataagtagaggagtttaacttcatcttttgcagatgagctaaatttgctaaaaatccacttgaagatcttctcagcctcatagctcagagaagcacaaagaaggccaagacagcaagctccctcctgtctcaactcctgaagcaatttgctactgtgtttattttaatgcaaacaaaaaacacacacaaaaggcttaagttttctatgatgacacgagtaatacatcttacaaaagaatgtcttaagtggttttttaaatttctattcaaactacataaaaggttgaaattttctccactctaaatactacattctgtctagcctgcattgccctcaagtatctgtctgacattactttctttttacaaaatcaattatttacaaacagtgagggaaggcccaaaaatgctaaattccatctcaaactgtattaaataactctcagaaaagggcagcaacaaataattagataaaacactctatacataactacattctacataatatccaatatgtaatgactataaaataaaaaatggtaatagttaaatacagaaacttaaaaggataacagtaatgatttacatagaactttaataagtaactctataaaacaaaaccatcaaaaggcactaaggtttatgaccagctgagataaattttgggtacttgccaacactgcaaatctttgggaatcaccataacaaaaaatgaccacacacctctggagacgctaatagccagagaatatatggtttggatccactcttacccaaagaaggaaattcctttttacctctattctctaagcagtttcaaattctctagtttacaaaaactaattttattcttcatgcctgcatcaagagtttatgccattccataagtcaagactcagttatccagtgagactagtaaattaaaaaaataaaatattccagccaggcacggtggctcatgcctgtaatcccaacactttggaaggctaaggtgggtggatcacctgaggtcaggagttccagaccagcctggccaacatggtgaaaccctgtctctactaaaaatacaaaaattagctggcagttgtggtgcatgcctgtagtcccagctactcgggaggctgaggcaggagaatcacttgaacccgggaggtggaggttgcagtgagctgagatcgcaccactgcactccagcctgggcgacacggtgagactctggctcaaaaaataaatattcttttcaagtggattccatttgtattcaaccgtaattaacacataattaatgcagataaaaatgacaagacccactgaaatgtcaatagatgttcataaacaaagccagtgggtttgtcttcttgtgtattgttaagtaatttctaaaaatatattttaaagtcatttaaaccgaaccattattagttacttacctttcattaagcacatcatgtgcagcagccaagatattatccaattgtttaactagtacctttaaaagaaaacacatttataaaaacttcaaattcctatacttttaagaatagcattgtgtacttttttacttgtcttcccctccaaattctaattcaacagtactttactttctttattattcccactccccaatgagcatgtatcaggaatgtcatgtttcctttcagcctatgaaagaaattcacccactggaaacatagagctgtgatcatcaacaaaaaaataaactcaaaaagtttgttttatttactttgaaatccatttgaaaaattgactgatggatggagggatagatggagagatatgtgacaaggcagtatttagggcaaaacattaacgacaaaaattagatgatgggtttaacagattcaatgtcaaattctttcaacttgctatatatttgaaactactcataataaaatttggaaggaggagaaacttgctttgatccaagtgtcatctgcctcactagaccattttcattaattttctcctgctcattgtcaagttctttttttttttttttttttaagatggagtttcactcttttcgcccaggctggagtgcaatggcgtgatctcagctcactgcaacctccgtctcctgggttcaagcgattctcctgccacagcctcccatgtagctggaattacggtcatgtgccaccacgcccagctaattttgtatttttagtagagatggggcttcactatgttgggcaggctggtatcgaactcctgaactcaggtgatccgcccaccttggcctcccaaaatgctgggattacaggcatgagccaccacacctggcccatatcaagttcttaattggtgtaaagaaagtgaagaaaaaaatttaacccttcctatactttgttacatttctgttgttgttttaagagacaaggactccctctgtcgcccaggttgacatgcagaggtgtgatcatatctcactgcaaccctgaattcctgggctcaagtgattcttccacctcagccaggtgtagtggcacatgcctgaagtcccagctactcaggaggccacagcgggaggatagcttgaatccaggagtttgagactgcagtgagctatgattgtgccactgcactccagcctgggtgagagcaagatcttgtctttaagaagaaaaagaaattacatattagagagcattaagttcttgatcatcataatacagactttccccattcttaaactactcaaggtagcattacctagtttattatggaaacacaaaaatcctcatatttccaaacatactatacttaccagcttattttctggttgctgaataaattctttcaactgctttacagtgaccaatcttcagtctctgtcgtcttcccgggtgatcctccgaagaagatttgacagtcgagactcatcacaataagacatcgatctctctgtgaatatataaacattttgttgtccattgagtataaataagcaaaggaatttttaaattttaaaataatttttaaatttttaaaattaaaaattatttaaataataattaaattattatggtggctcatgcctgtaatcccagtactttggaaggcgggtagatcacatcagttcaggagtttgagaccagcctgggcaacatggtgaaaccctgtctccacagacacacaaaaaattacataaactagccagccaaggtggtgtgcacctgtagtcccagctactcgggaggctgaggcaggagaatcactggagcccatgaggtggaggttgcagtgagccgagatcaccccactgcactccagcctgggtgacagagcaagaccctctctcaaaaataaaattacatcaaaagtcacagtccactggtcaataaaagctcagggaatataggtcctatcgctcttttgttcaactctatattccaaatcccagcagagtgcctggcacataacagaccctcaaaaaaatatttgctgaaggaaacgagaaatgaataaccctaggccagctgaacacctcattccagaggactggctgggagagaaaaaagaaaggccttagtaacaacttcctttgggtccattccaaactgttttcaacatgcaggtaaagagcctgggtgtaggtaaattaaacaacttccaaggggtacggataaagcctcaatcgagtaaaaacaggatataggcttctacttatcatctaggtatcccactggaggaaagcctcttattcacattatcatcatttccctgggatgaagttttggggagccataatcacacatttagttcaacaaatgtctaattatcatctaccacatgcaaggcatgcctccactagaaaggtagcaaaccacaacttttctccccttattttttaatcacaagaacaagcacacaatagtgaatactattagtatattaacaatgcctttaaaaactagatttttgctgggcgaggtggctcttccctgtaattacccagcactttggaagggcaaggcaggcagatcacttgagcccaggagttcgagaccagcatcggcaacatggtacaaccccatctctacgaaaaatacaaaaattagctgggcacagtggcacatgcctgtaatcccagctactcaggaggctgaggtgggaggatcgctttagcctgggaagcaaaggttgcagtgaaatcacactagtgcattccagcctgcgtgacagagcgagactgtctcaaaaaacaaaacaaaacaaaaaactcaatttttgcaaaacattttcaactgtgctatttaccataattagccaatacatacgtaaacaacaaatcacaaagggtctgacagtttcatttctaaggtatgagaaaaaattgataataaaagaaaccagaaggctgggcgtggtggctcacacctgtaatcccagcactttgggaggccgaggagggcagatcacggggtcaggagattgagacctgcctggccaacatggtggaacttcgtctctactaaagatacaaaaaattagccgggcatggtggcacgctcctgtaatcccagctactcgggaggctgaggcaggagaatcactttaatctgggaggtggaggctgcagtgacctgagatcgcgccattgcactccagcctgggtgacagggagatactccatctcatagataaataaataaataactacaaggggagcaaaacacactggatccttttggagggtggggggtgggaggagggagaggatcaagagaaacaaccaatgggtaccaggcttaatacctgggtgataaaataatctatactacaaaccctcatgacacaagtttaccagtgtaacaaatctgcacttgtatcctgaatttaaaagttaaaaaaaaaaaaaaaaaaaaaaaagaaactacaatgtctgagagaagaataggatttttacaaatccgtagcccatagagtatttcaataaggacagataccaaaaatgtcatcaagttaccagctgggaaattaggctctacttacaattctgtcactagcaaactacctttgaagaagaggaattgtttactgaactactttagagtcactgtttagcttctataatatcataagtctaaggcttcaaacactctgttttaacaaacagcatacatagcctttgaattcattccacttgtgaaaacataaaaagaaatcagttttttaaaagttatataccaacaataaaagctacaggcacaaagattttcaccaagatacacgaagcacacacacagtataaaaaaaaaaaaaagtcaaaaactaaatgtccaaaaagtaattacatctgacaaagcccataactcagctttaccgataaatttctctttaaggaaaaaaattatcattacctctaatcctctgaactttcttttttgttgttgtttttttgagacggagtctcgctctgttgcccaggctggagtgcagtggtgcactcagctcactgcaagctctgcctcccgggtagctgggactacaggcgcccaccaccgcgcccagctaattttttgtattttcagtagagacagggtttcaccgtgttagccaggatggtctcgatctcctgacctcgtgatctgcccgtctcagcctcccaaagtgctgggattacaggcgtgagccactgcacccggccaatcctctgaacttccaaggcactcacctatacagtgaggctacgccataaggcagaaatgctatcagtgtatttaactttagaaaagtgcccactctaggcagggcccagtggctcacgcctgtaatgagcacatgtgatcacttaaggtcaggagttcgagaccagcctggccaacatggtgaaaccctgtctccactaaaaatgcaaaaatcagctgggtgtggtggcatgtacctgtactcccagctacttgggaggctgaggcacgagaatcacttgaacctgggaggcggaggttgcagtgaggagagattgcagcactgcgctccagcctgggtgacagagcaagactctgtctcaaaaaaatatattgaaaacaacaacaaaaaaaccagaaaagtacccactctagggggcggggggaaggagagcatcagcaagaatagcttaatggatgctgggtttaatacctagatgatgggatgatctgtgcagcaaactatcatggcacacgtttacctacataacaaacctgtacatcctgcacatgtaccctgaacttaaaagagaaaaaaaaaaaaaagacagaaaagtaccccctctatatatatatctatatcctccacaggcccaagagttcaaggacttgctgtagtaagagcctactatgcactatacattcaatatccacgataattgggtaaaccttttctgtaagatcttatccagtcttctaatcttgttttaagagaattctcttttaaaatgtactataacctttctagtgggaaattaacaattcacaggaaaagaatgtaaacaatttttacctgcacagtagactaatcaacttatgcctgtgcaaggcgttagtaagaggcatccagaataagaggagatacaagtctttggaaggtgtatgtgattggtccccattttcccagacttaccctgtgatttcctcatgtctttggtggctaaagcacgactgccatgctgaacactggtgaactcagggctggtcacattgttaaccctcagctcttgccccaacgacttccgaccataagtattttccccagatcctccattgacactgtagccacctacaaacagcaatgtgtacgttatttaaatatgattgttcgtttcattcagtcaatttcctgatagctcaggatcttactactcaatctgcagctcaaccagcctttgcttctcctacctttttcctgtactgtctgccttgaaaatcattttcatttcttttaatacacctttgaagttaaattaattttattttgatcccttcattggaaaataagcaaagaaatgaaaactaaattaaatcaaattttgcaccttaaaactttcttgaagtttagagacagtagccaagaggaacttcaaccttagctaaatatttttgaaaataaaaacaaaaatagtattgtatcttttttgtaagaaaactgcattgatgaattatgtacggaaaaattttaaattttaaaaataataaagtggataaacgtcctatgaagttttcagaaataacactgcatttgttattcgtattttaaatatattagaagaaagcgagaaagttgggggtgtaagaaggcaagaaggtgggataggtaggttcaaaaaacatgcttgtagcaataagaaaatatatatacccttttcgtcattctgtatgtcagcgtggactctggtatcatcgtgcctttgccgagacaccacagctgaatttgaaggttgcagtccgtaagaggaagaaccacctctatctctggatgaagaatattttaaattacctgggtcagctgatgcactatcagttctataaaaagagaaaagtttaagattagaactttaaataacataaataaatctttctttaaacaagcctctcttctcccaaattttacatttaaccattactattgtatttaatgtaatatgtactatatattatatgtaagcactcagccgtctaataagaagtctttcactgggaagagattctcaatggatgaaatgccaacttttcagtctcttctactgttctaaagacccattcagaaatacgaataactactgggattagggtgactttgctggttttagcattgaaagcctcctgtcccaggcaaaacaggacaattggttactctggtccagtgttctcctcacatgacttgataataagaataattctttctaaattctcccccatggagagggttaatcagtcaaaacatttcagcctttcctatcataaaaataaaaaacactggcagcatgtcagggacaggcaatgtcttaccaagttattttctaagtactgattaggtactgtagtattgaagaccccattgaagatgccttaattgtaaaggtagcaatcaaaattttaaaaagtaaaaaagaagacattttaagaaaataaaaggtatcagaaatgcaataacgttatatcggaaagttgtagttcataatctatttaaaatttaggtactgtttagaataatacctgatgcttattagtaaacaagtagggtacagccaagggtaaaagtttgtcctcatctaagtatctgctctacgcttcaactgcctcataagtaaaacagagctgagttacaagacttctcacgagtgttactctttcagccatcaatcataaactattaagaaagaagacaacaaaataatctgttatagcatatgaaaaatccaagtaagttcttcccctactgattttctcctgagaggaacaactttgaggaaaaaaaaaaagaaaatcacttctatgatatttactaaaaatgctttctcaaccttttagaacctgaatcttttagaaaagtttaggacactggcaaggccagaaactaacctattcctctacgctttgcccctctatggtgtaaaagtgacagcagtgtttgtatactgtatatatttcatttagagtttattagtctttccttgctcccaaaaatactaaacataaaactttgcatgagctcaatcagttggacaccttgatctgcacttactgcaatcactgttaatacagaatgcagacaataggtccaattaaacttggatatctaactggtacaagtcattacttacaaaggatctcaatctgaaacttcatgaaattcaaaacctagcatactaaaatgactacggctccataaggagtaccttctaatattcagagttcgcttattcataaagctaagtacttcgaacataagggaaaattaaatctatggaatttcaagaaaaatgtatgagaatattttctgagtatactaagtctataagcattaaaatattaactcaatggaccataacttttttaaactaatgaaaagacattccttatgtacctaaaaatagcacatttaacatgcgtctatataaatcatagcataccattactttctgaaaggagactgaaatgtaagagagcttataatcttttctgacagggtgtgaactttatatgtacgccacagtaagctcttattagatgagcaaataaaataagcacttgactaattcagaaacacaaagataactgaagtctgccaatatttaaacatatcttcacttcctgttttcatcatgtttacttatctcctatactacctttactattaagagttaaatgtttgtatcattttctggtgacacagtagtaccataaggcagcagagaatacaagttaaaaaaagatctgggctcaaatcccagctccagcactgaaaagtatgtgtgcctttgcacaaattacttgatctccaagccttggttgtctcttgcataaaatgaggatgatacctatctaacatgtaaggttgttgtgaggcttaaataagataatgaattataaagaaacacttagtttgcagggtatgttaaaagttattatgaccataatacaaaataaactcagtttccagtctaaaagacaatgtacaaacagttcatgagtatatgaatataatcaaaacaagtttttacagtcaatatagagcaacttaaatacttcactgaagaaagcaggtaatctgtggctaccaacaatgtgtttccaactaggaagcatctgatttcaaactaaactgtaaaaccaggagcagcttccccattggttagaaataaggtttctaaatcccctaagttatgaacactgagatttttttcccaaaaaaatttgtgttttcagaaatatagcaaaaaaactggaatagagccactgtctcagaaatacctgaaaactccctagctgccaaattattttaatacaaattgatcaaagcatccccaaccagaactcaggttgtaagcattctgaacctaaaagcacaaaatggtttagcatttatacgaaatttctatttttatacaatcttgactgcttaggtttcaaaaaatgtcaatgtcaggctgttagcaccaacaagatcatcccagtccaataaatagaaaactgttaaagaacgggaatgagaacttaaaatgaggcaatcaaagccacaaaatagaaactgcagatttgaactccaagaagcaggcatgaatgttaggctagttagttagaagagctgaaagggatatcatctgccagaattagtgtctcaatttagtgaaaaaagaaaatctatctgttaagtctaagaatcctaacaaggatccaaaaatacttctacagcccctttaatattctaaaaatatcatggagagaaaaaaaaagaaatgcataaatttccccaaaacgatcaaactaaagttaaagcctgaggtacatgccacatgagaggtaagtttctaaagctcatacctcaaaaatcgcatactgtgtaacatggagcctttgtgatgttttgcatcaagtcaatctgtaagacagtagttacaatattagtgaagacagtgggttaaaacatttgttgttcaaacatggagcaaatatcattcatgagttaggtgcctttagttgaactatggtcccattagggttcatacattaaagcaaaaattgaggtggaaagccactccgtgccttacaggataaagaggcttaatgtggcaaccaaaaaatttttagtacataagagaatttaaatgttaactataacatacaaatcacatgcaaatatagttaccacttattttagttacctcttctcaatatacagaaaaatgccacaaatctaggaggccactggtttcaaatgaccggaatccttagacctcacaccaacaatccaccatgtggtggggatggtatcgcctgactaaatgtagtcttgcagtccattcttgtaagtattagagagaaaaagagagagagcgtcatctctgcaaagtgtgaagtcagggacttccctactaggaagcatttccataaagcaccccaaaatgacttgatgcaaacaccacacctagtggtgtcactggagtaagcatcatattacttcaaattgcttttacctaggtttattaagggattttgctctcatgctgagatctaatttgtaatggatataaaccaggaaatgagatttgcactaaagccaatgaagtaggaatgtacttattctctaaagtagcaaagatagtctcactgtcacagagcagttataggatatgttgctttccatactaatggttaataccacttggaaatgatttacccttcaaaaataaattcaaggttttcccctgtaatgcctcttacctggattcaaacatgctttaatgaggaataagagaaagggtgaaactatgaataaccccgggccttgtatcattacattagaaacactgctctaaatatgagtctatggctaaaatattaatttgagaggctcagggaatttattatacaaatctcttcttgcagagaactttaagttcaaatttaataaaacaaaacagaaccattccacgtcaaaattgtaaatgagtatgcatcagttttgcaatactgagatactaaattaatataatttattggtaaaactagtttaactacctcagtattaagtgtctataataaccaaatcttaattatccatttatgggtgatttgtttccttttttgagacagggtctcactctgtcacccaggctggagtgcactggcatgaccatagctcactgcagcctcgacttcatgggttcagcctctcaaacagctgggaccacaggtgcatgccactccatttagctaattttttatttttatgttttttggagacaggtgtctgattatgttgctcaggctgctctcaaattcctggactcaagcaatcctcctacctcagcctcccaaaatgctaggattagaggcatgagtgaccacatctggactgtcaccaatttttaactgtctctcaactaaacagccaatatagactgataaaatatacttaactattgtaaaattgtaaagaattgtatcttcaccaaggagaggtctggcttttacctgtgaattctggaaggtaatctctaaactcttgaaatgtcatacctaataagagggtcctggccaggagcagtggctcacacctgtaatcccagcactttgggaggccaaggcgggcagatcgcttgaggtcaggattttgagaccagcctggccagcatggtgaaacctgtctctactaaaaatacaaaaattagccaggcatggtgacgggcacctgtaataatcccagctactcaggaggctgaggtttcagtgagctgagatcatgccactgtactccagcctaggcaacagagcaagactatctccaaaaaaaaaagggggggggggcggcggtggggggaaagtgtccttgttcatctgggggctttaggccacagcagagtctaataatgtggcttatggtgggggctttgagtcacatggatcagcttgacctccagtggggctggagactaaggttagccacatgggcatgcaaccatggaaccccagtaaaaacgttggacataaaaaatagagtgagcttccctggttggcaataatccatgagtatggtcgcacaccagtgccaccaggaaggtgtcatttttcacaactctacagggacaggacaattcaaaactccaacatttggaacttccccgaactctgccctatgcacctctacccttggctcattctaatctgaatccctaaactgcaataaactctaactatgggtatgagagctttcaatgagttctggtgagtcctcctggcaaatcatccaacctaagagtggtcttggccaggcacagtgactcaagcctgtaatcccagcacttcgggaggcccaggcaggcggattacttgagctcaggagtttgagaccagcctggcaatatggtgaaactgtctctaaaaaatatagaaaaactagccaggcgaggtggtgtgtgcccatagatccagcaactcaggtggttgaggtaggaggactgcctgaacctgggagggaggaggtcagggcacagtgagccgtgatcatgccactgcactctcgcctgggtgacagagagaggccctgtctcaaaaaaaaaaaaaaagagtggtcttgggaacccccaaacttgcaactagtattagaagcaagggtcatcttatggactggactccctcttactctgcactcatatttaaaaccattaaatatactgtagctcaaaaaaaattgctcctttgttttgaaaaagggtctcacactgtcgcccaggctagagtgcagtggcgcaatccgagctcaagcaaacctcccacatcagcctcccaagtagctgagaccacaggcttaccccaccacgcccagcaacttttgtatttttttgtcccattctctacaacattcccaaaatgttgcccaagctggtctcgcactcctgagctcaagtgatccactcacctcagcctcccaaagggttgggattacaggcataagccactgcacccggccataaattttgttttttagtaacatttctagcaaacatgataaagatttgacttcagtgttgcttattttccttccaaggaacctctaatattctctattttcagaactccaatcaaattagccagaaagagcaaacgaagccaataaatctaggagggcaatagatctgattttaacccttgtttcacatgcacaattgtcttcagagaaaagctgaagaaagtaccccctcacctccatgccccaatgctccttttctctgacttcaagtgggcctctgatgctgcccacatttccctcaccaggtttctttcctttccaaaacatctgtaaaactttctgcaccttcttccttctcccaccactaccagtggatgaccttatagatttctgctccatgagaaatagaagccatttgacagcaccctcagcaagagctaacattttagctcctaacaagagctagtgggcaactgatccaagcagtttacaaatgtttatcatgtcatttcgtgttcaacacaatcctattagttataacttgataactaaggtttcataactggcctaaggttgcacagcttgtaaaaggcagagtcagaactcagacccagtactgtctaatgtttgagctcttcaacactccatcgctgcctgtcatcttccttctaatatatccacaaattcacctgcatctgcacatacaccttttcttcccatcatcttcccataatggaacaaataaacctcctatccatagaaatcatctggatctgtctattccccccattttccaaggtatgtcttgtcttttttttttgagatgtagtctcgctctgtcgaccaggctgaagtgcagtggcgtgatctcgactcactgcctcccggattcacgccattctcctgcctcagcctcccgagtagctgggactacaggcgcccaccaccacgcctggctaattttttgtatttttagtagagacggggtttcaccatgttagccaggatggtctcgatctcctgacctcgtgatctgcccaccttggcctccccaaagtgctgggattacaggcttgagccactgcacctggcctgtttcttttgtacgttgcaaaatctcccattttactactgcttatcacatcgtcaacatatgagcactctcaaaagtcttactttaaaaaaaacaaaaacaaaaacaaaaacaaaaaatggccgggcacggtggctcacgcctgtaatcccagcactttgggaggcaaagacaggcagatcataaggtcaggagattgagaccaccctggccaacatggtgaaaccccatctctactaaaatagaaaaaataaaactacctgcgcatggtggcacgcacctgtagtcccagctacttgggaggctgaggcaaaggaatcatttgaacccgggaggcagagcttgcagtgagccgagatcgtgccactacactccagcctggtgacagagcaagactctgtctcaaaaaaaaactaaaggccgggtgcagtggctcacgctggtaatcccagcactttgggaggtcaaggtgggaggatcatgaggtcaggagttcaagaccagcctggccaatgtagtgaaaccccgtctctactaaaaatacaaatatcagccaggtgtggtggcgagcgcctgcaatcccagctactcaggaggctgaggcaggagaatcgctcgaatccgggaggcagaggttgcagtgagccgagattgcaccatttcactccagcctgggcggcagagagactccatctcaaaaataataataataataaaataaatttaaaaattaagaaaataaggccgggcacggtggctcacgcctgtaatcccagcactttgggagggcgaggcaggcagatcatgaggtcaggagtttgagaccagcctgggcaacatagtgaaaccccgtctctactaaaaatacaaaaaattagccgggtgtggtggtgggcgcctgtaatcccagctagttgggaggctgaggcaggagaactacttgaaccccggaggcggaggttgcagtgagccgaggtcgcgccattgcactccagaccgggcaacagtgtgagactctgactcaaaaaaaaacaaaaaacaaaaaaaccctttaactgcctttctccctctatcaatctaatagcctggactcttcacagacaaacctgttgaaaaatttatcttccttgccttcatttactttttaacccactttaatctgggttccacctgcaacacaccactgaagctattcctactaagataggaactgccactcaaggccttcttggctctaaaagcccatgagcctttatcagttcaccttacaatttctcaataccattctaaagtttatgagttttttaactttaattccagtgactctttctactttatcccaatccaagtattctcctccttctttactttttttttttttttttttgagacagactctgactttgttgcccaggctggagtatagtggtgcaatactggctcactgcaacctccacctccaggttcaagcgattctcctgcctcagcctcccaagtagctgagattacaggcccctgctaccacacccggctaatttttgtatttttagtagagacagggtttcgccatgttggccaggctggtctcgaactcctgacctcaagggatccacccgcctcggcctcccaaagtgctggaattacaggcgtgagccaacgtgcccggccccttcttcacttctttaaccagcttagatttcattgtgtatcatttcaacaacactcttgcctatacccttaactcttaagattttcatcacagccatctggcaaaaccccaatcctggataaacccaacgatccatcaataagcaccacactcccaggtcctccagtgtttacttcccattctatacatgcactatccagacattcccattctcttcaaattccaaaatatcctatccacctgccctccccatacacacattctacttcaccaacaacaaaaaaaaaggtaccagctgggcacggtggctcacacctgtaatccctgcactttgggaggccaaggcaggtggatcacttgatgtcaggagttgggacaccagcctggccaaaatggtgaaacctcatctctactaaaaatacaaaaattagctgggtgtggtgatgcgcacctgtaatctcagctacacgggagactgaggcaggagaatcgcttgaacccaggaggtggaggctgcagcgagccaagactgcaccactgcactccagagcctgggcaataataagagcgaaactccgtctcggggtagggtggggaagataccataaaatatctgcacccgattctagaccttactgaggattccatctacttccaccttactgtaactttgcaaatacttttcccactgaactaaatcccccccataaacaagcaacactttctaatgtatcccattgaaaaatacaaaaacatataaaaaggaaaaactccatcaatcccacatgtccctccatcaaacaatctgccttacttgctgcagccaaactaaagttgtctagactcccctctcccatttcttcagttcttctagctccttaacacacactggtccaatttctgccccatcactcttggcaaaatccattatgacctccaggctgctaaatccaagatacagttcaggcctcaatctgctcatcctttcagcagctttcacagggctgctgagtagggttgagcagttttgccctgcacacaggtgccctgcagaggaatgaggtgggctgaatgaaactccttttttaaaaattctcggctggcatagtggctcacgcctgtaatcccagcactttgggaggctgaggcagacggatcacttgaggtcaggagttcaagatcagcctggccaatatggcgaaaccccatatattaaaaatacaaaaattagctgggcgtggtggcgggcacctgtaatcccagctactcaggaggctgaggcaggagaatcacttgaacccaggaggcggaggttgcagtgagccgagactgcgccactgcactccagcctgggcaacaagagagaaactccatctcaaaaaaaaaaaattgtttatgccaactaattgtacacctaaatgcaccaagttcatgactttctccttgcatttatttatttatttattttttaattaggtctcactctatgttgcccacgttgtagtgcagtgtgtgattacagctcactgcagccttgaactcctgggctcaagagatcctctggtcttagcctccccagtagctagaactataggtatggagtggctctctgcctttatttctaacccaagctaccttacaaccttaaaaagagacgctgcttcgccaggcacagtggctctcgcctgtaatcccagcactttgggaggccaaggcgggcggatcatgaggtcaggagttcgagaccagcctgaccaacatggtgaaaccctgcctctactaaaaatacacaaaaacttagccaggcctggtggtgtggcgcctgtagtcccagctactcaggaggctgaggcaggagaatcatttgaacctgggagacagaggttgtagtgagccggaggttgtagtgagccgagatcacgccgctgcattcccacctgggcgacagaacgagactcaaaaaaaaaaaaaaaaaaaaaagagagagaccctacttcagctctcaattgcatcgcttatcttccccttttgtcagttaagtcctggaagtaccctagaaacctatcatttggcctgggaaattgccaagattgaaaggaaatgtcttactctatgacctctttaacagatgaaggacaaaaaaggctgaaaatgtacaaagatatgcatccctcccccaccagttaaatgccaaacataggccagccacagctgatcacacctgtaatcccagctgtttgggagtccgaggcaggcagattacctgagttcaggagttcgagatcagcctggccaacatggtgaaacccagtctctactaaaaatacaaaaaaattaggcaggcgtggtggtgcacatctataatcccagctactcgggaggctgaggcaggagaatcgcttacccagaggtggaggttgcagtgagccgacagctcgccactgcactctggcctggagaacagagtgagactcagtctccaaaaaaaaaaaaaaggccaaacatagcccattccaaccaagattaagaatcactaagagttacattgcaccactgcacaccagcctaggtgacagagcgagactccgtctcaaaaaaaaaaaaaaagagttagttacacactgcagaaatctaaacaatctcaaaagtagactgggactttataatcaaggtaaaggtgaagtgatgtttaccaatataagaaatgaataggccaggcgcggtggctcacgcctgtaatcccagcactttgggaggccgaggcaggaggatcacaaggtcaggagatcaagaccaccctggctaacacagtgaaaccccgtctctactaaaactacaaaaaaattagccgggcgtggtggcaggcgcctgaagtcccagctactcgggaggctgaggcaggagaatggcatgagcgcgggaggtggagcatgcagtgagctgagattgcgccactgcactccaacctgggtgacacagcgagaccccgcctcaaaaaaaaaaaaaaaaaagaaatgtatgcaaccatttttttcaactcctgaaaatagtcagataataactgtagttattctgataaagttcctttagccaacaggttgaagcacattcccagggaataacatgtttataagattttctaacaattgcatatgttaaatcttctctttaaaaataatcctggccaggtgcggtggctcatacctgtaatcccagcactttaggaggccgaggcaggtggatcacttgaggtcaagagttcaagatcagccagaccaacatggagaaaccctgtctctactaaaactacaaaattagccaggtgtggtggtgcatgcctgtaatcccagctactcgggaggctgaggcaggagaatcacttgaacctgggaggcggaggttgtggtgagccgagatggcgccattgcactccagcctgggcaacaagagcaaaacttcatctaaaaaacaggaaaaaataaaataaaataaataaaaataaaaataatcctaggccaagctggctacagtagctcacacctgtaatcccagctactcaggaggctgaaacaggaggatcacttgagcccaggagtttgagaccagcctgggcaacacagtcagactgtgtctctaaagaaaaaaatcgtcatcatcctaggccagtccagacaacatagcaagacctccaactctaaaagaaaatgaaataaaaaattttaaaagtcaatttaattagaggtctcaagtaattccagaagatacagtctcacaaatcaaatactgagaaaggaagacacctttcaagataatcacactattattttaactgtaggaaaatgtattaaatgaagacagcttttgctagctgctgaaacatactagtaagaacaggaaacgatgctcccaccatgctcagcagtagccagaaatttactgaggtctttgtatttagccttaagtataagacacctaggaaacttcaaaatcatcacttaagccactttaaacccacagtctatacaaaccctttttcttttgttacattttatactaaacacactttaatcagactgacataagtgatttaaaagtaacttttataattcccttttacaagaaaaaaagaaacaatgtttccagatactaagttccttaagagacagcaatcatttattatagatttacagtactacaatttcaaatagtaccagaatctttttttttttttctttgagacagtggcacaatcacagctcacggtagcctcgacctcctgggctaaagcaatcctcccacctcagcctcccaagtaggtgggactagaaactcatgacaccatgtccagcttttttttttttttttttgagacagagtcttgctctgtcacccaggctggagtgcagtggtgtgatcttggctcactgcaacctctgcctccagggttcaagcaattctcctgcctcagcctcccaaatagctgggattacaggcatgcaccaccatgcccagctaatttttatatttttagtagagatggagtttcaccaggttggtcaggctggtctcgaattcctgatctcggtgatctgacagcctcggcctcccaaagtgctgggattacaggtgtaagccaccatgcccagccaatttttttattttttgtagaaacgaggtctcactatgttacccaggctggtctccaactcctgggctcaggtgatccacccacctccctgccttggtctcccaaagcaccaccatgcctggcccaaaatcttgtaattgcttaatactgtatatacattcttataatgatatgatatttcccatatttgtgtagaagatgcatgtggttcttctccaccccctcaagtacttaaaactatcacattggcagagtacaacctttaaatgtttctggcatcctccctcctcccattaaaaaaaaaattaaaataaaaatatgtatatacacgcccatacacactacaacagagggaaaaaagcaactcattgttcaactggtgttcttataagaatcagttcttaaattccaactgtgtagtaaaaggtaagcaagctataagctaccttttaacctatcctttctctatatacgttccatttacattgtacttgccctccaatctatgcaaacagtcacaaagattagattatgtttgctggcttatcatttcaactagtaacaaattcttaaggtgtgaatacaagatatggagaaaaaatgatgatgcacagctatgctgaaatttcgtattgttcaacttgaaatacgtttacagcctaatgggagtacactagaaaatgtagaaagagagcaggcacggtggctcacacctgtaatcccagcactttgggagacagaggtgaatggatcacaaggtcaggagttcaagaccagcctggccaacaaggtgaaaccccgcctctactaaaaatacaaaaaaaaaaaattacctgggtgtggtggcacatgcctgtaatcccatctactcaggaggctgaggcaggataatccaggtggcggaggttgcagtgagctgagatcgcaccattgcactccagcctgggggacagagcgagactccgtctcaaaaaaaaaaaaaaagaaaagaaaaaaaagaaaatgtagaaagagagccactccactgcagagcaattaattctatctccactaatatttttctaaatattcactgaaacagttttaaaaataatttcctgaactttaaccctcccaacatcttcaaaaggcaaaaattaccccctcagagggacacagctggtagtgccaatacaaaagatctttgtcttcccattcttagtccatagcttttttcatgacaccagcctctcttaagataaatatctgtgaaggatcaactttttaaaatacacacattctagctgggcacggtggctcacatctgtaatcccagaactttgggaggctgaggcggaggtatcacctgaggtcaggagtttgagaccagcctggccaacacggtgaaacccgtctctactaaaaatacaaaaattagccaggcatagtggcatgcacctgtaatcccagctacatgggaggctgaggcaggagaatcgcctgaacccgggaggtggagattgcagtgagccaagatggtgccaactgcactccaggctgggcaacagagcaagatgccgtctcaaaaaaaaaaaatatatatattcttaaaaataaagacacttagagaggaatctaaaacacactggttctatttttaacttcaccaatgctaagacagcgggtgtttttttttttttttttttgaaaaagaaaagggaacaaatttcacataggagaatagtttttgaaatctttgcacaacagggtggccatagtaaataatgattatttatttgcaaagagaagacagagataacaatagcaataataataatgtatttcaaacaattaagagtaaatttcaaatgcctcaccacaaaatataagtaagcaaagtaaggcgatagtatgttaattagtatgatttaatcatactacattacacacatatatataaacattacgttgtaccctatgtgtacaattatgatttctgaattaatattagagtggggagaacaataatgattaatttttacttcttcagtaagattacaatgaaaatgtagagagcactagcattatagtaactatacgataggccactttaaataaatggcatcttttacaaaatttttagtcaataagttgattacgacatacttacgaactatttgctattaagtgtaagttaatttataattttagtattttcaaaaaaggaacatattaaaatcctatcaatatttcaaataatgacaaaattaatcatttttaatagaatccttactcaggtcctccaaaaacaatataaactatgacttaaggtaaattcctttaaatctgactaatgaataaatgttaaatctcaaatttcatagtcccagtgctggaaaatctatatttttatttttcttcacgtttatacaaagaatgtacagacaggcaagaaatgtaatcaacctttttaggaaagaatcccaggatttgttttcttttcaattaaatatatatgaattctgggggatactggtgatcatctctggatctttttactcatctaatgagaaaagagtctcattatacaaagaggatagtcaaaaagcctaatgatttcctcacataagtaggtttttctgtctggcaaatctgaagaagtcaacatagaatctgtcattaatgcattgaatctgaacttccactattcaaatcaaattaggacctggaaataaagtgttaacacttcagacaagaaattccagggtttgtatcatcaggaatataaaccagggacactctcaagaggctgaagagcaagagtcatgcactgcttcagagaattaaatactccaagatgaaagttaaaatttcaaacacacatatcacacatacacatcttttaacatcaggttgaaatgctaaagggaacagagtaaaggtatgtttttaattaataaatttaaatgagagaaaactttaaattcaaagagcttcagtaaaaaaaaaaaagaaaatattagcaatgttatcaaatgtggacgaaaagctaatatatgtcactatgtaatccaagacatattcattagtggcgccttttttctgggctattaatatattagatgccatccaaaaacaaatatctagtaaatattaagtttaacgacttcttaaaaacctgtaggttcccaaagacatatacatgtatgtgcagtgaggccactgctaagcctctaataatattcttgtagactactaaagttctctatgatgataaaaagggtaataaaaaaaaaatctagtgtctccccttaataaacaaagaacgagcataacttaggaagttcggtaacaaaaacaatctataattctggtaccagaaatccctctgaggctgggcgaggtggcttacacctgtaatcccagcactttgggaagccaaggcaggggggatcacctgaggtccgaagatgaagaacatcctggctaacagggtgaaaccctgtctctactaaaaatacaaaaaattagccaggcgagtggcacatgcctgtaatcccacctacttaggaggctgaggcaggagaatcacttgaacccaggaggtagaggttgcgtgagcctagatcgtgcccttgcactccagcctgggcaaaaagagcaaaactccatctcaaaaaaaaaaaaaaagcaacaagtccctctgaaaaaagttttaaataataaacaaaagtctataacaggtttttaaataactataaagtcctacacatattacatgaataccaacataataatatgaatatgaatatcaacagggtatccaattccttttttgaaaaggtctgaaaattaatatgaaagaagtaattctgtatgttcagaaatctgttgattctaggccaggtatgatggctcacacctgtgttatcccagcactttgggatttacaaaatgggatttcctcctcacctaaggtcaggagttcaagaccagcctggccaagatggtgaaaccccatctctactaaaaactacaaaaattagccaggcgtggtggcagtcgcctgtaatcccagctactcaggaggctgaggtaggagaatcacttgaacccgggcggcagagtttgcagtgagccaagatctcaccactgcactccagcctgggtgacaaataaaataaaataaagaaatctgttgattctggaatatttgcgtttcattccccaatcagcaggtatccaattggcaagaagtgtgtttccccaggcattctaatgggatgccagaaggctcaacccagtgcttaaatttttagtgattacattgcttaaataatgtagacagatacaatagattcaagataaatcaatatgtaaaaagactttaaatatgtgcacaaggtatttttcaagatggataaaacatatgaatcttaaattaccatctttttttttttttccctgagacggaggtttttttcctcttgttgcccaggatggagtgcaacaacagcatcatctccactcactgcaacctctgcctcccaagttcaagcaattctcctgcctcagcctcctgaatagctgggactacaggcgtgtgccaccatgcccagctaatttttgtatattttttagtcgagatggggtttcaccatgttggccaggatggtcttgatcccttgacctcatgagccgcccacctcggcctcccaaagtgctgagattacaggtatgagccactgcgcgtggccaaattaccgtattctttcttctgtaaaaagatctggccactccagtccattacgatactgtccttttgagcctgctcaatcagtttgtttaagccctgcctcaggctaacagggctgccataagaggaatgctttccccaaaaacacatcctacaagaacagtgttgtaatctctagagttaacacttaatataaaaacacaaacttgcaggatctcgttttcatgaatttacttgaggaaagacacaaatatagagtggatgctatttattgatgcacttagtaggaaagaaggggatagcaaaagtaacaattttaccagatccatgcacatatgcagattgtattttactagagatggcacacataaaaattccagatagtggtaaggatatgaaaaaaagtggcaggaatgggtgtgatagtgaaaaagtcactgcatatctgtaccttgactgaggtcatggttacacaggtgtatacatttgtcaaaatttactgaatttaagacctatacaggccgggcgtggtggctcacgcctgtaatcccagcactttgggaggctgaggcggatgggtcacctgaggtcaggagttccagaccagcctggccaacatggtgaaaccccatctctactaaaagtacaaaaactagccaggcgtggtggcaggcatctgtaatcacagctactcagggggctgaggcaggagaatctcttgaacccgggaggcggaggttgcggtgagccatgatcgcaccattgcactccagcctgggagataagagcgagacttcacctcaaaagaaaaaaagaaaaaaaaaaaaaccaccaccacctatacatacataaattttatctcaaagaagcaccacaatagaattcaaaaacgaaatcaatttaaaaaggaaaagtacactcgattaatacaagatggaaaagaataacattataaaaccaagtatctctgcatgagcgaactccacaagaatttagtaagttatactctacattaaaaaaaaaacaaaaaacaaaaatacagaataaggaagcatttcctatacatatgaaaccacaaaatttctgtaatctttactgttaggcctctatacaaggggaagtatgtttcattttatagttccaaaaataaaatgggctctgaaaaacttcaagatagtcaaagacaggtaaccaaaatgatgacaatgtgaaaagattaacaaacagctcctctaaatcattaagggtggtccaatgaaaggagcctcagggatttgttttaggtgattaggataaggaacaagagccagataacaaaggcagaaaatcctaaagaatttaacaattcaatgttcccaaaagacaccatggaccacactccattttatatgacacttaaatgacattccatacatgtgtctaacatgaagattgagcagataaaaagtatcactttagtaatcatcctcaatcaacaccagataacaaatgaggggcttttgcttatggaaattctcacatattgagctgaacacttttaccttaattaattaattaatttatttattttttgagacagagtttcgctcctgctgcccaggctggagtgcaatggctcgatctcggctcaccacaacctccgtctcccggattcaagtgattctcctgcctcagcctcccaagtagctgggattacaggcatatgccaccacgcccggctaatttttgtatttttagtagacacggggtttctccacgttggtcaggctggtctctcccgacctcaggtgatccacccaccttggcctcccaaagtgctgggattacaggtgtgagccaccatacacagccttatcttaatttaaattgttaaatataaacataatactcaggtccttagcagccccttctctatattgttccaattaactgcctcccactgcgatctctcttgcacgtgtgtgcacgcactctaacacacacactttttttttttttagacggagtcttgctcttgttgcccaggctggagtgcaacggtgcaatctcagctcaccacaacctcggcctcctaggttccagcaattctcctgcctcagcctcccgagtagctgggaatacaggcatgcaccaccacactcggctaattttgtatttttagtagagacggggtttctccatgttggtcaggctagtctcgaactcccgacctcaggagatccacccacctcagcctcccaaactgctgggattacaggcatgagccaccatggccagcccacacactttttcaagaagcaactagatttaatcttcctaaattgtgccactttccggcaggtaaaatttcaatgattccctaaagtcactccaaatacacttaaactgggccagggtggtggctcacgcctgtaatcccagcactttgggaggccgagatgggtggatcacctgaggtcatgagttcaagacaagcctgaccaacatggtgaaaccccgtctctagtaaatacaaaaaattagccaggtgtggtggtgcgtgcctgtaatccctagagctacttgggaggctgaggaaggagaactgcttgaacccgggaggcggaggttgcagtgagccaaaatggcaccattgtgctccagcctgggcaacaagagcaaaaactctgtctccaaaaacaaacaaacaaacaaacaaaaaaacacctgaactatgattaaaggtctacaatagggttcccaacccagtgcttcagcttcacctcttatttatattactcctcataagtacccaattcctctacacactgacaatttgcacctggccttatcctaattttcttctattttgggggggattctcccccaaattcacagtgaaaactgtacagaccaattccatcaccccattttccctcctctgaccctccaagtttttgtttttgtttttgagacagtctcgctctgtcacccaaattggagtgcaatggcatgatcttggctcactgcaacctccacctcctgggttcaagcgattctcctgcctcagcctcccaagtagctgggattacaggcacccaccactgcatccagctaatttttgtatttttagtagagatggggtttcaccatgttggcctgtaaccccagcactttgggaggtcaaggcgggcagatcacctgaggttaggagtttaagaccagcctggccaacctggcgaaaccctgtcaatcatgccactgcactccagcctaagtgacagagcaagactgtctcaaaaaaaaaagaaaggaaggaaggaaggaaggtatactgagaattacatcacaaaatccacatgctctccccttcacaaagccctttacttttctcccataataacttatagcctccttgaagacagtggttttacaagtcataaaaatcctggccgtggcccagtgcagtagcttgtgcctgtaatcccagcactttgggaggccaagacaggcagatcacttgaggtcagaagttcgagaccagcctggtcgacatggcgaaaccccgtctctactaaaaatacaaaaattacccaggagtagtggcacatgcctgtaatcccagctacttgggaggctgaggcaggagaatcgcttgaacccaggaggccgaggttgcagtaagccaagattgcaccagtgcatttcagcctgggcaatacagtgagaccccatctcaaaaaaaaaaaaaaattatggccgggcacggtggctcacgcctgtaatcccagcactttgggaggccgaggcgggcggatcacaaggtcaggagatcgagaccatcctggctaacacggtgaaaccccatctctactaaaaatacaaaaaattagccaggcgtggtggcgggcacctgcaatcccagctactcgggaggctgaggcaggagaatggagtgaacccaggaggtggagctggcagtgagccgagattgcaccactgcactctagcctgggcaacagagcaacactccatcttaaaaaaaaaaaaaaaaaaaatttatacacacacacacacacacacacacatctccctagaagcatcaatatttactgaattagagtattttattacctgttataaaaaacaaacaaaaaaaccttccattatactaatttataaaggaataaaaacaaaatgggttggggagtccaggcacggtgtctcactcctgtaatcccagcactttgagaagcacaaggtgggaacttgaggtcaggagttcgagaccagcctggccaacatggcgaaacccggtctctaataaaaaattagccaggcctggtgacatgcacctgtagtcccagctactcgggaggcagaggcacgtgaatcacttgaacccaggaggtggaggttgtactgagccaagatcgtgccactgcactccagcctgggagacagagtgaaactatgtctttaaaaaaaaggcggggtgcagtggcacacacctgtaatcccagcactttgggaggccgaggcaggtggatcacctaaggtcaggagttcatgaccagcctaacatggtgaaaccccgtctctactaaatataaaaaaattagccgggtgtggtggcacatgcctgtaatctgatctacttgggaggctgagacaggaaaacagcttgtacctgggaggcggaggatgcagtgagccaagattgcaccattgcgctccagcctggacaacaagagcaaaactccgtctcaaaaaaaaaaaaaaaaaaagttggggtgaggggaaggttcaacttaaagatacgattactaactgtttcataaggaatgacttatttcatactggagtaggagtttgacaccagcatgggcaacatggggaggccccatctctacaaaaaaataaaaataaaaaattagcgtgccaagcatggtgggtcacacctgtaatccttgcactttgggaggccaaggaggaaggatcacttgagcctaggtattcaagaccagtccaggcagcatggcaaaaccccgtctctacagaaaacaacaaaaaaaaagtagctgggggtggtgacatgcacctgtggtcccagctattgggagggtgaggtaggaggacttattgagcctggaagatggaggctgcagtgagctgagatggttccactgcactccaacctgggcactggagtgagactctgtttcagaaaaagagagaggaggccaggcatggtggttcatgcctggaatcccagcactttgggaggccaaagcgggtggatcacctgaggtcagcagttcaagaccagcctggccaacatggtgaaatcccatctccactaaaaacagaaaaattagccgggcatagtggcatgcacctgtattcccagctacttggaaggctgagacaggagaatcacttgaaccaggaggtggaggttgcaagtgagctgagattgtgccactatactccagcctgggcaacaaagtaaaactctgtctcaaaaaaaaaaaaaaaaaagagagagagagagagaggaaaaataaataaattagtcaggtgtggtggtatgcacctgtggtcccagctactcaggaggctaaggcgggaggattcccagagcccaggaagtcaaggctgcagtgagcagtgattgcaccactgcactccagcctgggcaacagagcaagagcatatctcaaaaaagaggaaagaaaagaaaagaaaaacataaaaacaaacgttcctttagttttaatttttattttttagtttattatggccgttttactctcccccaagtaaaacagccatgcacaatttgctgaaattttccttagtgtactttgaaatctgtggaacagaactggcaatcgctaaattctatttgactctagttccatttaatattagactggtgtgaaagtaactgcggtttttgccaaaaccgcaattacttttgcacccacctaataagtataaaatatgtaacttcacttaattttatcctttatgtatttccctatattatgtacctatggacatcaaacttagtacagactgataaaaggctgaacagacaactctggtttcaaaaatccagcttctcacaacatcagacatactagtatacagcttttctaatttcacaacacatttccattttttggtctttcacaatagagaagatgtgtatacttttgaatactctgatctgtctacaatctaccaaaattggaaggtgtttttattatacagtttcatccttttagaaatatacaaagatcctaagtttgggcacagtaagacactcaatatagatctactactaaacaagtaagaccaagtacataattaatgtcctaacacccccagtggagaagtaaaatctacttgttttctgttgacttgaatgccttctcttctttgttgaattaatcaatctacttgactccaatgtcaaattaatcaatgtcactttagaatattaaaatgtacaattatgaattacacatttaaaacacatcattctgatctctgtcttgattgatactagaagattatcttccaaactaaggtggaaaaaatgacagactttagctattggcaatgataggtcatttttttagggaagaggagtaaagagggcaacctccataggtcagatatccctttgttctaagaagccaccacctctgtttcttcatatgaaaaaaaccagaggcatccagtggttcccaaaaccttctcaactttacgcttgaggaacccacagatttcaaataatacaactgacctaagaccactcatttgtttaaccattctttttttaattttttatttttttttttgagaaggagtcttgctctgttgcccaggctggagtgcagtggtgtgatgtcgctcactacaacctccgcctctcaggttcaagtgattctcctgcctcagcctcccgagtaactgggattacaggcatgcaccaccacatcctgctaatttatttatttttttttttttttggagagacgggggtttcaccatgtcggttggctaggctggtctcgaactcctgacctcaggtgatccaccaacctcagcctcccaaagtgctgggattacaggcgtgagccactgcccccagcctgcttaaccattcttaaatgtcgggtgcggtggctcacacctataatctcaacactttgggaggctgaaggtgggcagattgcttgagttcaggggttcaagaccagcctgggcaacgtggtgaaaaccccatctctataaaaaatacaaaaatgagccgggctgttggcaagcgcctgtagccccagctacttgtggatgctgaggcaggaggcttgagcctgggaggtcgagactgcagtaagccaagtatctgtgccgctgcactccagcctgggtgaccacagcaagaccctgtctcaaaaaaattgacagaagagttgactgagagcacagtgaatgaaaaggaagactataagccagtgccatataaatgcttactgttggaggtatgcttctatggaacacgggtttgctctcttgccatatgacattcacgtattcagccacctggaacacttcctgtctgtatgtgtgaagtatcatgtgtggtcaaaattgactcaacagtcattttccacaccaactggcaaactaacactaaaagaaatcaacaagtattgctttttcaaaagcctaaatcggctgagtgcggtgacttacacctgtaatcccagcactttgggaggccaaagcaggcggatcacctgagtcaggagtccaagaacaggccggccaacatggtggaatcccgtctctactaaaaatacaaaaattagctggacgcctgtaatcccagctactcaggaggctgaggcaggagaatttttccctgtaagcgggaggcagaggctgcagtgagtcgagattacaccactgcactccagcctgggagacagagcaagactccatctcaggaagacaaaaaaaaaagcctacatcaaggaaaacagaaccaaaacaccagggacaaaatggtacataagaggcaaaaaaaattttcaccaaaattattcagatgaaccataataaatgtgcctgcatctgaagatgttctaaaccttcatttaagcaagaagcaagatcaagatccgttccgtcagttacctggagtctgtcatctttctgaataggggacagaatcacctcaaatttaactaataaaaatttatgacttggcaaacaccccaggtatttttattgactaacaaatcagctatgacaatcttagcaacaaatcaagttatgctatggggtatgtccacactttcctgttccctctacaacaggagaaaatcaaatctttccaacatcctaacaaactgttactccctgtaaccaaatgtatcacagtatcgtctaccaaggcgttacatcctgaaactttcctacaaaaagcacagcttcaaagaaaccttgcaagctttcttgtaagctcctcccttcccacatcgcccctccccagagccaagaaataaagcacttgaaagaaacaacatggataatatttattaatagcttatgtacatattccataactacataagccatttggcttcatacctgtcagcaatgaagtcagctggccctagcacgtggctgcgactcttctctatttatttagaactacaaactacaatttacactttacaaaagctgtaggactatttgggaaggcactttattcttctaaaaggttactaaattctcttaaatacttatactgatcacaatactgaaaaataatagaaaatccattgtcattcatttaccacctgatttgttagatgccagataatcaaatttcacacatttcaataaaaaggcaaaactaagcatgtcaatcataggaagaaaaatacttaactaattttatttaaagcactcacaaactcttaagtggtacaagacaagtcaacgctgtttatcgaacaatattttttttttacgactaaacatctcaattctagactcaggcactaattattaaagtcatctagttatatacaccaattctcaacagacacagttttttttggaaaggcatattaaacagactaagatgtgtactacccattagccaaagataattttattgatttttctaatgagtcttcaaatgttacattctaacatcttagcaaattatttccaaatactgctggaattacatgtaactatcaggaaacaaaagggcttctcaacaacttgtgcgttctacattatctggccagtttccggacaattataatacaattgtgctccaaagtaggagagttccatgaatcaattgcccctaaaatatatttctgtatatttaaggagttctaagcattgggttaaattccaaacagactctgaatacaagcatttatttagtaagagaggttagaataaatcaatcctaaattaggcacagctgccctccccccattgatcaaaaagacaggaaattacatttatttaaaaagttaatgttcctaatatattcaaatctaactaagccccaaaacggtctgagatcaaatcctccataaaagaggaaattctctagacttctaagtgggtgcccaaagagttcactcaagtgtccaggtatgaattacgattcaccagagtaaccggccttgcacttagggaaaacttccatcgcccaagaccagagtgggtcgatcccatcaacagtcacacaatctcatctcatgctccactaatgaatgttctgcctaaagtcagagcaatgccttggctggagttttgttttggttttttcaatattaccacgtgggggtcacagaaagggaacagaggttacaagagctctcacgtggcggctgaaagactggggaaccgagaaagtgaatgagtaacagggagggtcctggactctcaggatctcccaactcggggtcagggggaggcggtaagtggaatgcccccccaccacccccgcctctttctcacctcctggtcccgaccctaggccagtgccaccgccgggagccccgggtctcggcttcagccccaggctgaacatgcagggaggggagaggcacttaggcctcgcctccccgtggccttcctcccccagccggggcggaggagaaccaggaagccgcgcccggctccggtgggtggagggcctaggccgcgcctcccagccccgcggccctaggcctcggcccgcccgaggcggagcccgggaggtcggggcggggtcccgggccggtcacccacctgggttgccagtcattccagctccgcgaatagttggtgccgccgctgctcagccgagaccccggggctctgcggctcattaccttccccgacacgacatggccaagcgccgccgcccagagaagcgcgagtcgccgcccgaaccggccgctgccgacaccccgctccggcccggggctgaggaggaagccgaggaggaggaagagaaggaggaggaggaggaggaggaggaggaggcggcggcggagggcggggtaagaggacggccgttccgggttccgcctgagcccgcaacgcagaatgaggaggcgggagcggcgcggtgagagagaggcggatgaaggggcgccgacttctcttccagggccatgcgcggcccacgacgccggggccccggaggacgaggacgacgaggagcaggcggtggcggcagctccccacgctcacaaggccactgcttccccgcctcccggctccgcccgccgcgccgccactgtcgcacggcatgctgggagcgagaggcggggtcggccccgccgggcctggggagagaggcgggtcctgtcggcggggcggggccgagagaggcggggccgatagcaggccgccccgccccccacggccccaggctcttggacggcgaag

SEQ ID NO: 55 - DNA, 146337 bp, Homo sapiens; identical to SEQ ID NO: 54

SEQ ID NO: 56 - DNA, 11716 bp, Homo sapiens
ttaaatataatggcaagaaaacattcctaccaattttatttatccaggcatgtcttaaatatggctgtttgttacatacagtgattctgcagacatgttgacatgacagtgaaatacataaatatgtaatgagaaaaggcttaactgtggataaaacaaagtcattacaattaaagactcgagtttttggcatttccaattgtagtcagggcactgaggtcaaatttaactacaaattttgcattgtctacattgaacacatgattcttaaaagcctcatgttttatttcagaacaggcctcaggaagttgcagactgtgcaggaggttgtttagggcacaagtcatttctcccaatattaacttataggcagtctccaaaacaggaatattcttcaagctgagcattgcttgataaacagcatgggctacagcaacaacctgaaaaacaaaaaattcaaggaagtgataaatggaaaataaatcttctaaaattatatggaaaataaatcactatctgtattagtgctgatgatacaaataaatttaagattgatcaattcactgtccgtagcacttaatattttaatttttaaaaaaccaatcagaaaactgacacagatcagtatgctatttcaaatctattaagttttatcacaaataaagagtactataaatgaaaactgtcaataggaaatttccaaaatggccgtttttttttaaataatcaacatcaaaagacatatgcaaacagcaatttaagactgggtttcttaaatctaccaggaaagtctgtggtggatttgactagggggtggttgaaaagccagtcatttttgtttacaaaatatacagtacttaatttataactttataaatgtgtcaacttgttttacccttatgaaaatttaataaatttaataacagcaagagatgcatagtctgaaaagagtatctggcacatcattcatgaaagtattcagtatgattatcaagaaatataaatttaaaagaacaaatacaatcactatattctaaatcaaacatttcacatttcactcaatttcacttatatagcctggtaagcaacattaggtccaactcttcagtgactcaagttgtcaaaattcattatcagtgtattacttacctctttttctttatgataacgcaagaatagtagtttagatgatggtataaacagtttttctacaaatgatgatggcagtttcgtatttatctgttcaacaatctaaaagaataaaatttttaaaaaatgagcttctcaaattacaaaaagacatggagaaaccttaaatgcacactggtaagtgaaagaagtcaattgaaaaggctacatactatatgactccaactacatggcattctggaaaaggcaaaacgatggagacagtaaaaagatcaggggttgccatgggcttaagatggagggagggaggagtgaggagagggaacgaggaaggagtgggtagaacatcaaagatttttagggaagtgaaactatcctgtatgatactggtaataggggatacatgtcattacacatgttaaagtccatagaatacataacacaaagtaaactataaaattagttaataataatatatcaatattcactcctttgtaataaatgtaccacactaacacaatatgttaatgagggggaaactgttgggatgaagaaggtatatgggaactcattgttttctgctcaattttctgtatatctaaaaaataaagtcttttaatttagaaaaatatatctaagctatattttaaggccttaatactgtgacattaaagtgtttagacacctaaataggacacacgtattttacagttatcatgggcattttttcacattagcaaagagaggtgtaattctggcagaaatgctcagcagaatgtcatctagaatttgctttaaaataatccagctggagatgaaaggatagcaaagaggcctagatgaaaccagatgggccatttgtttctaattatagaagctgagtgttaaatatgtacaaatttattatactatgctccctatttttatgtgcttcagaatgtccataataaaagtggggggaggatatttatggttaagaaattaaaggaggccggccgggcgtggtggctcacgcctgtaatcccagcactttgggaggccaaggcaggcagatcacgaggtcaggagatcgagaccatcctggctaacatggtgaaaccccgtctctactaaaaatacaattgtgccactgcactccagcctgggcaaaagagcgagactccgtctcaaaaaaaaaaaaaaaaaaaaaaaaagaaattaaaggaggccaggcatgattgctcacacctgtaatcccagcacttcgggagggcaaggcaggaggattacttgagaccaagaatttaaggccagtctagacaatgtagtgagaccccttctctccaaaaactacaaaggttagccaggcatggtggcatgcatctgtagtcccagatagtcgggaggctgagtgggagaatcacttgagcccaggagtttgaggctgcagtgagctctgattgtaccgctgcactccagccaggggaatacagcaagatcctgtgacaaaaaaaaaaaaaaaaagaaaaaagaaaaaaagaaagaaaagaaaagaaaagaaaagcaaaaaagaaagaatctggtgcgtagagcaatgtttcctcagaaaaaacgagtaaagctacactgagactagctatcaaccactaaaaatagaggcctggcagagtggctcatgcctataatcccagtactttgggaggccaaggcaggtggattgcttgagcccaagaattcaagaccagcctgggcaacatggcaaaactccatctctacaaaataatataaaaaattagccaggtgtggtggtgcacgcctgtagtcctagctacctggggggctgaggtgggagggtcacctgaacccaagaggtcaaggctacagtgagccaaaatcatgccactgcacttcatcctgtgcaacagagtgagaccctgtctcaaaaaaaaattgcattaaaaataaaagtaaatagacactaaaatgaaagcatagattataagactgatgaatgtactctaaaaaataatataataaagcaaagcccttattttttttcttttttggagacagggccttttttgtcaccttggctgagtgcagtggcacaatcagagctcacttcaacctcaagttcctgggcttaatcgatcttcctccctcagcctcccgagtagctaggactgcaggtgcacaccactacaccaagctaatttttgactttttgtacagatggggtctcactacattgcccaagctgtgccagaattcctggatgcaagcaatccttctgctttggcctcccaaagtgctgggattacaagcatgagccaccatacccagacaaagtccttaatttcttacatatcgatttaagggcctgaataaaccaacacattaaaaaggaaaagaataattcacataccagcgtgagtaaattcaagactgagatgatataatcggtaccacaagtctggcaattctccagttggtctaatccatatgtaatgaccatgtcacaatgtatagtcatgctaggatccaagctgccgagcaaaacaccaacacactcattagcagctgtcaacacagcctcagaaaaaaacacctggtttgcagccgtcacacatctcattactctgtacagaacctgtaaatggggaaaacaagcagctttttacaaaaattcacgtgcttccacaaagcaagaaaatactttttatttaatgcaatttcaactgaaaattaactgcttgccttgccagcagtctcttaatattctagttctcagtagctgaataataatgatccctttactacaatatgtaaacatgatcttggctaaaaaatcctaaagtgctactatgacaggaaatggaacctgccatcctctatttcccatatacccaacttcgtttctcccaatgtcactaaatggctgaagctcagaatctttatcatgaaatacaccacgacagtaatggtattgacagcatgggaatagcctgcccacacatactacaagctagctcttgggcttttgggaatcaatctttcaaaactgaacatacaagtcactttaagcttattaaagtttctatctactgatggtctcttttgaaagataagcactctcatgcttaccacataatatcttcaaaaatcatattatttccaatacacacacaaacaaaatcccccacttaactataatggccaataattgtgtactaaatttctaataaaatgggggagaaaacagagcaaatgtttaaaaatatttctataatatttaacaaccaatacatacaggattttatttagtctacccatagttttcattaaaagtatccttggaggttgggcatagtgactcacatctatcatcctagcactttgagaggattagctggaaggttctcttgagtccaggagtttgagaccagccatgtcaacataacaacacctcatctctaccaaatttgtttttaaattagttgggcgtggtggctcacaccagtagtcccaccaactacttgaggctgaggtgggaggatcacttaagcctgggaggtcaaggctgcagtgagccaagatcgtgccactgcactccagcctgggcaacagagaccatgtctccaaaaaaaaaaagagtgggggagagagggcggagggggaaccattcttggccatgcatgcacagtggctcatgtctataatcccaacactttgggaggctgaggtgggaagactgcttgaggccaaaagttcaagaccagcctgggaaacactgagaccccatctctacaaaaataaaaaattagcaggaactatggtgggaggatcacttgagcccaagatacagaggctgcactgagtcgtgatggcaccaccccactttaaaaagaaaaacaaaaaaagctgggtatggtgacacccgcttgtagggctgagtgaatgggaagttcacctgggcccaagagttcaagactacagtgagctatgattgcactactacactccagcctgggtgacagagtgaggctccagctccaaaaataaataaaaaaaataaaaaccccaccattctaccattctcaaaggcctaaaagatcctcataaatcaatatacacctatcctataaattatgtcccttttattttatgtctgaattaacggctttttatttcaactctgtacagtcttcaaccaccttttagacattaaaaatgaagcaaagatattaaaccattttgaaaccatattggtttaaaataccaatatgctggtttcatttatctttaagttctgacatttctgctcaagtacacaacttactatataatcaatatcctattttatttagcaacatgttcagcaaaagtatatgctcctaaaagcgagttttatcctaacagtaaaattttcatcagttagattaatttttttatgactgtatcacacatgcttctttctccttattcaaagcagagtacaatgcctggggttcatttcttgtgtcttttccactgaaccctcattggatgtgctatatacagtgcagctaatgtttgaggctgctgaagtgtggcaatctagctacctcatttttaatttgtttatgttctttgatatcaggctatcaaagaatataaagatatacaagttttcatatgagttccatcttatgctcagagaaggttactttctgaggcttctcctatagtgtgctattcgtaatatgttgaaaaactaaaaggaaacccaataatttaaaagtaaaattataagaaatattatttcttataataataccggcgcaggagggcagcaccagaggccagtggcactcccagctcggtgagagggctgggaagccagggaataaaactgggagggtggggtggggctggtgtttggggcacctcaaactcacaacattgggaatctttgtgggtccgggaatggtaatcctgaggcctcagaacacaggtttcagattgataggcctgcaggtctccaggcagcaaccagctgagcgactaaagggcccaaggccagggctctagggatggggctcagcagaggctggggtaaggggagccagggaggagctgggcctaatgcagcaccgggtccccaggatgccgtgtctcggctggaggaggagatgcggaagctccaggccacggtgcaggagctccagaagcgcttggacaggctggaggagacagtccaggccaagtagagccccgcagggcctccagcagggtcagccattcacacccatccactcacctcccattcccagccacatggcagagaaaaaaatcataataaaatggctttattttctggtacctcccagactctgatgactggtcccctagacacgcagtttgctgaaccaaccagccctagagcttcccctccaccgcgctgaggggactgacccatggcaggggatgtgggatgccccctgacttactacatcacaggaacagggccttcgtgggtagaaaccagccatgctgatgtgggccaggaggctgctctccgtttccgagctccttctcagagctgacacagctgaactatttaaggccctagcttagaacctcaataattcccaaatttaccaaaaatctgcctttcctagtcaaccaaaacatcacgttgcacgtgactctgctggcactgttgcttgtgaggaaatgaaccaaccatcacttacagggtaggcatcttttaaactgcaggtccaaagataaaaataacgagggaggctgggcatggggactcacgtctataatcccagcactgtgggaggctgaggcggcaggatcatttgagcccaggagtttgagacctgcctgagcaacacggcgagataccgtctctacgaaaaataaaataaaaaattagccaggcatggtggtgggcacctatagttccagctactcaggaggctgaggcaggaggatcccttgagcccaggaggtcgaggctgcaatgagccattgcaccactgcactgcagcctgggtgacagagcaagacactgtctctaaaaaatataaataggccgggtgtggcagctcacgcctgtaatcccagcactttaggaggccgaggtgggtgaatcacctgaggtcagaagttcgagaccagcctggccaacatggtgaaaccccatctctactaaaaatacaaaaattagctgggcatggtggcaggcgcctgtaatctcagctactcaggaggctgaggcaagagaattgcttgaatccgggaggcaaaggttgcagtgagccgagatcatgccattgtactccagcctgggggacaggagtgagacttcgtctcaaaaaaaaaaaaaaaaaaaatatatatatatatatatttttttttttttaaatgtataaatacatcatatatattttaatatataaatatattatatatattatatattttaatatataaatatattatatataatatattttaatatataaatattatatatattatattttaatatataaatattatatatattaattatatattttaatatataatatatattatattatataataataaattatatattatattatatagtaataagttatatattatactatataataatatagtataatatataatatatattataatatattatattatattatattatatattataatataaattatatatattttatatatatgttttatatattatatattttaatatatgaaacaggggaacttcttctaaggaaaagacagaattaaggcaacaggctgatcctagtttaccagagaagaaactgaggccgggagcaggagcccagctcactgaagggcagatcccaagtcagagtccaagtctccccacttttttatttatttaattttttctgagatggagtttcattcttgttgcccaaattgagtacaatggcacaatctcggctcaccgcaacctctgccttctgggttcaagccattctcgtgcctcagactcccaagtagctgggattacaggcatgtgccaccacgtccggctaacttttgtgttttcagtagaggtggggtctcaccatgttggccagactggtctcaaactcctggcctcaagtcatctgcctgcctcagcctcccaaagtgctgggattacaggcatgagccgctgtgcctggccttatgtctccccttttgaattcagagccttcccccgtgtagtgagtgcttctgcctctctagcccttcctgtgggttctgcctgggcctgacctctgtgagagacctggcaggaacaggtctgtcaggccttgtggggagtgggtgtgggaataggttttgatacccaacttagcaggtgatcctgagatgggaggacacagggctgtttgggatgggcgtcttagccatagtaaggtttggttcatatcaagcagggaccacccatggcgtcatttccaggccccacctcttcagtatgccatagaaaactacttgggcagtagaggtgtgggaagaaaacaaaaaagaaagctgggcataagtggcacacgcctgtaatcccagcacttttggaggccgaggcgggtggatcacctgaggtcgggagttcaagaccagcctgaacaacatggagaaaccctgtctctattaaaaatacaagattagccgggcgtggtagcacatacctgtaatcccagctacttgggaggctgagacaagagaatcgcttgaacccaggaggcggaggttgtggtgagccgagatcgtgccattgcactccagcctgggcaacaagagtgaaactctgtctcaaaaacagacaaacaaacaaacaataaaaaaaccccaaaaattagctgggcatggtggcgtgtgcctgtaatcccagctactagggaggctgaggcaggagaatcgcttgaacccgggagggggaagttgtagtgagccaagatcatgctactgcactccagcctgggcaacagagccaagactctgtctcaaaacaaacaaacaaacaaacaaaaaaacgcaggaaaagagtgtgtgatggctgaaacttgcaatttctcactctcaacgagccctggccccaactaggttatttgggctccctccctaggtctcagggacctctgttcaaagtcctagcaatctgggccaggtacaatggctcacgcctaaaattccagcactttaggagaccaaggcgggcagatcacttgaggccaggagtttgagactggcctggccaacatggtgaaaccctgtctctactaaaagtacaaaaattagccgggcatggtggtgcacccctgtaatcccagctactcaggaggctgaagcacaagaatcttttgaacctgggaggcagaggttgcaatgagctgagatggcgccacggcactccagcctgggcgacagagcaagaccctgtctcaaacaacaaaaaacaaataaaacaaacaaggtcctagcaaccctactaacctgttatgaagactgatacaggggcatcacctgccccaattttctgactcaggtcagccttatattcctactctaatctcacccctatccccgtcccacacccactattcttaaaacctccatggtcctccgggggcagctgtagacacattaagcccagggctatggggccactggaaccttctccagtgggtctgaaaacatcagcattccaggagttgatgagcccctacctgggcaccactccctcttgggcctgagaaggccggggggaacctgcaaggaatatgtggaattctatatggtgcctctgatactgcggtaatgtcagggagaggtttgttcaactggtcagggccctgaaaccccgatcactttctcatctctgcatcttgaaggctagcagagaggaggaaccctgagctctctaggaggtgggtaggtggtggcagtacagactcctagatgtctaaacggagttgcagagagaaggctttctcggtagaccctggaagggacttttacggtagaactttcattttacaagcagggatagaggcctagatggggacagagacgtgtccaaggtaaaacaatggacggaggcagggcagggagaggccaggtcctagactcggcctcagcacccctcccacacacacatcgacacagaagctggtccagatttataatttaatggctgtgcagatcccagtccctcatttctgtcgctcacgtgcccactggtctggggtcagggttttctgttcaaaggcatggatgtgcgggagctcttctgctaggcacgcgttcaccagcctggggcgagagatggggttaggaaaaggccagcggtgatcgcacaccccgaggctagggtgacccaagagactggtgtccccaaggttgtagtccccaggccgtgggaacacgtacttggagagagggtctacatcgaaatactcgaagcaggggtcacgaaggcgggatcctcaaggtccctgagccacgccagggggagtgcgggagtcaggttgcaggggtagggggagtggctggggttgtggtacaggagctaggcaaggtgctcccagggccttacctgtgtctctgaagcagcggtttcccctcgaacttggccgacaccaccaggactcggaagctacaggagcaacggttgagggtcgtgtcctccacctcctaccgagcggaagaatatgaatggtgccgaacccgccccccgagctcttttccccttgtccggcggctcaactcaccacatgctccgcctccaggtcccgctgcagcttctcgcggaggtattcggcgctgagttccatggcggcagtccagctggaacggcagcccagcagggacacaaccccagctcgggcgccggccacgctaccttgctgccttacaggagccacttccgctggaaaactcacttccgcccttactaaggcgtacgtcaacgcagtacttccgccctcaagcagccgggctttccagcggtccaggcttttcgcgcttgccatgtgtcagccaatcagagcctgaggaaggtgggactcgggcggagccgatgctgaatggtacgcgctcgccgactggacagcagtctggcttccgcggtcggacttctacacccgcctccagacaggagaggggcacgtaccggcgctacggcttcctgcaggctgcctccggatagtccccgagagcttgttccgaagcaagcaccctgcagccctagcgatccagccctcccctggaccctaggtcacggcaatcaaccccctgctgtggttcccgaaccccaaggcccgatgggtcccgcgggggtcgcggcgaggccagggcgctttttcggcgtctacctgctctactgcctgaacccccggtaccggggccgcgtctacgtggggttcactgtcaacactgctcgtcgggtccagcagcacaatgggggccgcaaaaaaggcggggcctggcggaccagcgggcgagggccctggtgagagggggaggccttctgtgccgggaggaag

SEQ ID NO: 57 - DNA, 3666 bp, Homo sapiens
cttctacacccgcctccagacaggagaggggcacgtaccggcgctacggcttcctgcaggctgcctccggatagtccccgagagcttgttccgaagcaagcaccctgcagccctagcgatccagccctcccctggaccctaggtcacggcaatcaaccccctgctgtggttcccgaaccccaaggcccgatgggtcccgcgggggtcgcggcgaggccagggcgctttttcggcgtctacctgctctactgcctgaacccccggtaccggggccgcgtctacgtggggttcactgtcaacactgctcgtcgggtccagcagcacaatgggggccgcaaaaaaggcggggcctggcggaccagcgggcgagggccctggtgagagggggaggccttctgtgccgggaggaaggcgtcccagaggaggcggaccccgcggggcacaggcctgttgagaaggaccggccaggactgtgacagaggcggggcgtctgtggtggggacggggcctgtcgcaggggaggagcgtgacggggaggcggtgcccggggcatctccgcggcggaactcagggaaggagctagctggggcgggggtgatgatccaggctgggttccagcatagggctcttggtgggcacgctggggtcgggtggaatgcaggagagagaggaggtgggacaggtgggtacctgggctggaggcagggcctgaggtgggcaggtgcagagggctgcacttctcggctgaagccgggaatgaggaccccgctctcgggtgggattggaggggacccgcggctgaggcgctgggctgcgacagggacatcaccgttctcctcctcagggagatggtgctcgtcgtgcacggcttcccgtcctccgtggccgcccttcgggtaaggaaggagaccgggcagcggcggccgggtgagggcttgggttccgcccctcgctccgagccgccctgatgcccctgtacgccgcccgcagtttgagtgggcttggcagcacccgcacgcctcgcgccgcctggcgcacgtggggcctcgcctgcgaggagagacagccttcgctttccacctgcgcgtgctggcgcacatgctgcgcgcaccgccctgggctcgcctcccgctcacgctgcgctgggtgcgcccagacctccgccaggacctctgcctcccgccgccgccgcacgtgcctctggccttcgggcctccaccgccccaggccccggccccaaggcgccgcgcaggtccctttgatgacgcggagcctgagccagaccagggggatccaggggcctgctgctccctgtgcgcccagaccatccaggtgaggtccccccgaggaatggatggctctagagtccagacgacttcggatccagctctttcttgagggaaacccactgacacgctttggccaccctatccccatctctaagatgctgatgctataggacttacggccattcctgagcaaagcaggccctgctcagggccttcaccatttccccttcaaagaaaaggttcttccctaggccatcagtactccgctgcactccagtgtggtcgacagagcatgaccctcttttttttttttttttttttgagatggagtctagctctgtcgcccaggctagagtgcagtggcgcgatctctgctcactgcaagctccgcctcctgggttcacgccattctcctgcctcagcctcccgagtagctgggactacaggcgcccgccaccacgcctggttaattttttgtatttttagtagagacggggtttcaccgtgttagccaggatggtctcgatgtcctagcctcgtgatccgcccgcctcagcctcccaaagtgctgggattacaggcatgagccaccgcgcccggccctttttttttttttagacagagtcttgctctgttgcggaggctggagtgcagtgatctcagctcactggaagctccgcctcctgggttcaagcgattctcctatctcaacctcccaagtgtgccaccacacctgccgaatgtttgtgtttttagtagggatggggttcgccatgttgggcaggctggtctcaaactcctgacctcaagtgatctgcccgcctcggcctcccagagtgctgggattataggcgtgagccaccatgcctggacatgaccctgtctctaaaacaatgtaatgaactgcagctcattcttgtgtgcacttttctgcaccccctttcccttaacacttactattgtctggcatgctacgtgttttcttgatctcattagcctctcccaccccaactgccacactgcactatcagagggcagcacttatcactgctgtagaacaaagtcctgcactgagccgatggcccagaaattttctttttatttatttatttattttttttttgagacagagtcttactctgtcgctcaggctggagtgtagtggcgcgatctcagctcactgcaacctctgcctcctggtttcaagcaattctccttcctcagcctccagagtagctgggattacacgcgcctgccaccgcgcctggctaatttttgtatttttagtagagatggggtttcaaccatgttggccaggctggtctcaaactcctgacctcaggtgatcctgcccacctaagcctcccaaaatgctggtattacaggcatgagccaccgtgcccggcctaaatatttaataaaataatggacgatgggtgccttctactgagctcccggtaattgtgagtgagtagaggacttgccctggggacattcagtgacctgctgggtgttgctgagctgtgaggaagttcaggtctggctgcagtggtgaggctgtgactcaatcaatcactgctgatgctcccaggacctgcaccagcttagtcctaggggcaaggattttaactgtccacctcagtttcttcatttgtaagatgcaaataacagtcacccctgcctcatgggatggagctgtgtaatgcccgcaacagtgcctgctgcatagaggggttgctgccagctgcctctccctccttgtctcttacctgcctgctgcctgggtcaggatgaagaggggcccttgtgttgcccccaccctggctgcctgctaagggcccatgtgatctgcctggcagaggagtttcttcaggaagaaccagggcagcttctgcccctagagggccaatgcccttggtgagtgcagtcccctggccccagcctggtccacctctgggaagagggtgcccagttgtgcaatccaggcccaggcagctgagccctcatctcagcatgcagggcggatactggagggggcttgtggcatctgactctgtatctcctacctgcccctctccttggtagctgtgagaagtcactgctttggggagacctgatctggctgtgccagatggacactgagaaagaagtagaagactcagaattagaagaggtgagtgggctttggtggcgggctccctaccccactccctgccctgggctgcctgtgaccacactgcttgcctctgcaggcacactggacagacctgctggagacctgatcctcagtgtccttaccccctcctacctcttttctgtgccacctgctgtgggtccagcaggtttttacttgagtacaataaaaagtctgagtcaa

SEQ ID NO: 58 - DNA, 9908 bp, Homo sapiens
gtgacggggaggcggtgcccggggcatctccgcggcggaactcagggaaggagctagctggggcgggggtgatgatccaggctgggttccagcatagggctcttggtgggcacgctggggtcgggtggaatgcaggagagagaggaggtgggacaggtgggtacctgggctggaggcagggcctgaggtgggcaggtgcagagggctgcacttctcggctgaagccgggaatgaggaccccgctctcgggtgggattggaggggacccgcggctgaggcgctgggctgcgacagggacatcaccgttctcctcctcagggagatggtgctcgtcgtgcacggcttcccgtcctccgtggccgcccttcgggtaaggaaggagaccgggcagcggcggccgggtgagggcttgggttccgcccctcgctccgagccgccctgatgcccctgtacgccgcccgcagtttgagtgggcttggcagcacccgcacgcctcgcgccgcctggcgcacgtggggcctcgcctgcgaggagagacagccttcgctttccacctgcgcgtgctggcgcacatgctgcgcgcaccgccctgggctcgcctcccgctcacgctgcgctgggtgcgcccagacctccgccaggacctctgcctcccgccgccgccgcacgtgcctctggccttcgggcctccaccgccccaggccccggccccaaggcgccgcgcaggtccctttgatgacgcggagcctgagccagaccagggggatccaggggcctgctgctccctgtgcgcccagaccatccaggtgaggtccccccgaggaatggatggctctagagtccagacgacttcggatccagctctttcttgagggaaacccactgacacgctttggccaccctatccccatctctaagatgctgatgctataggacttacggccattcctgagcaaagcaggccctgctcagggccttcaccatttccccttcaaagaaaaggttcttccctaggccatcagtactccgctgcactccagtgtggtcgacagagcatgaccctcttttttttttttttttttttgagatggagtctagctctgtcgcccaggctagagtgcagtggcgcgatctctgctcactgcaagctccgcctcctgggttcacgccattctcctgcctcagcctcccgagtagctgggactacaggcgcccgccaccacgcctggttaattttttgtatttttagtagagacggggtttcaccgtgttagccaggatggtctcgatgtcctagcctcgtgatccgcccgcctcagcctcccaaagtgctgggattacaggcatgagccaccgcgcccggccctttttttttttttagacagagtcttgctctgttgcggaggctggagtgcagtgatctcagctcactggaagctccgcctcctgggttcaagcgattctcctatctcaacctcccaagtgtgccaccacacctgccgaatgtttgtgtttttagtagggatggggttcgccatgttgggcaggctggtctcaaactcctgacctcaagtgatctgcccgcctcggcctcccagagtgctgggattataggcgtgagccaccatgcctggacatgaccctgtctctaaaacaatgtaatgaactgcagctcattcttgtgtgcacttttctgcaccccctttcccttaacacttactattgtctggcatgctacgtgttttcttgatctcattagcctctcccaccccaactgccacactgcactatcagagggcagcacttatcactgctgtagaacaaagtcctgcactgagccgatggcccagaaattttctttttatttatttatttattttttttttgagacagagtcttactctgtcgctcaggctggagtgtagtggcgcgatctcagctcactgcaacctctgcctcctggtttcaagcaattctccttcctcagcctccagagtagctgggattacacgcgcctgccaccgcgcctggctaatttttgtatttttagtagagatggggtttcaaccatgttggccaggctggtctcaaactcctgacctcaggtgatcctgcccacctaagcctcccaaaatgctggtattacaggcatgagccaccgtgcccggcctaaatatttaataaaataatggacgatgggtgccttctactgagctcccggtaattgtgagtgagtagaggacttgccctggggacattcagtgacctgctgggtgttgctgagctgtgaggaagttcaggtctggctgcagtggtgaggctgtgactcaatcaatcactgctgatgctcccaggacctgcaccagcttagtcctaggggcaaggattttaactgtccacctcagtttcttcatttgtaagatgcaaataacagtcacccctgcctcatgggatggagctgtgtaatgcccgcaacagtgcctgctgcatagaggggttgctgccagctgcctctccctccttgtctcttacctgcctgctgcctgggtcaggatgaagaggggcccttgtgttgcccccaccctggctgcctgctaagggcccatgtgatctgcctggcagaggagtttcttcaggaagaaccagggcagcttctgcccctagagggccaatgcccttggtgagtgcagtcccctggccccagcctggtccacctctgggaagagggtgcccagttgtgcaatccaggcccaggcagctgagccctcatctcagcatgcagggcggatactggagggggcttgtggcatctgactctgtatctcctacctgcccctctccttggtagctgtgagaagtcactgctttggggagacctgatctggctgtgccagatggacactgagaaagaagtagaagactcagaattagaagaggtgagtgggctttggtggcgggctccctaccccactccctgccctgggctgcctgtgaccacactgcttgcctctgcaggcacactggacagacctgctggagacctgatcctcagtgtccttaccccctcctacctcttttctgtgccacctgctgtgggtccagcaggtttttacttgagtacaataaaaagtctgagtcaagggtgccttatggtggatgctgaggggaggggcggagctagtagcccaaggtcctgccagtcacggggcttcctcaggggcacagaggaggcaggaggggcccctggccctagcacgtgaacagcttctactctgcctggaaaccccatgcctcagctttcccctacttgcctctgagctcatgcaattcttggaagcctgggagacttaccttgaaattgaatgcaaataggacaaagaccaaggaggatggggggatgccctccttccacggggccctgtggcttccaagtcttaatctcctctagtctcttgtctacggagcctccttcaaacccagggaaagaaaatcacctgccagggttgtttttcttctaggatcttctattgatgctctgtgaggtcccccaggagccatgaagctagggctggctcctagggcaatgggactacagtgtccttgtcctttcttattctttctgttctttctttctttctttttttttttttttttttttttttgagacagagtctcactctgttgcccaggctggagtgcagtggtgtgatcttggctcactgaaacctccgcctcctgggttcaagtgattctcttgcctcagcctcctgagtagctaggattacagatgcccgccatcatgcccagctaatttttgtatttttagtagagacagggtttcaccatgttggccagcttggtctcgaactcctgacctcaggtgatcctgctgcatcgacctcccaaagtactgggattacaggcgtgagccaccacgctcagcctctttcttgttctatatgtccatgctctgctccacttctgccccttcactctgcccccacacatcactccagactggccttgtggtcagagcctggaatgcctgggctgctgggggcctgtggactgcactgggccagaacccctgccgccttcaagactggcctgtagccagcaggtaggtgacttttcccaggccggcctatcccacctttcccctccactcactcacctcccttgcctgggtcaattagagaaagcttgtcggccaggcatggtggctcatgcctgtaatctcagcactttgggaggccgaggcgggcggatcatctgagctcaggagtttgagaccagcctggccaacatggcaaaaccccgtctctactaaaaatacaaaaattaaccggatgtggtggtgtgcacctgtaatcccagctactcgggaggctgaggcagaagaatcgcttgaacccaggagggggaggttacagtgagcggagatcgtgctactgcattgcagcctgggcgagagagcgagtctccatctcatataaaaaaaagaaaaagaaagaaagaaagcttgtctgttggcctgccctgcagggtggagttcagagggaaggtcaggagcctagtgacagctcaaaaaaaaaaaaacccaaataccaatgttggccccttttgcctttcattcatgtgttttctatacactaaactcacatattgggtttgcagatcactccaagcttggctggagctgtggtggtaaggagggtaatagagaagcttccccaccctcaaccccaccccttccttcctggagttcccagccctgactttagatccctcccacactggaccttcaaaaccctcagggcagagagcagccctacactccctacaccacacccatactcagcccctgcaggcaaggagagaacaggtcaggttcccgagagctcaggtgagtgacacgttggaatggcccagggcaccttcaccctgctcagcttgtggctccaacattctagaagccgaggcctctgccatccctgccctttcccatggatattccatttcaattagacaacccagcctggccggaatccccctgcgttccttcttttcctttgtgtatttttgagacagggtgttgctccgtcacccaggctggagtgtagtgggatcctggcccactgcagcctcaaattcctaggctgaggcaatcctgccgcctcagcctcctgagtagctggggttacaagagcaagccaccacacccagctaattttgaaaaatattttttgtagaggagaggtcttgctttgttgtccaggttggtctcaaactccagggctcaagggatcctttcccgttggcctcccaaggctctgggattacaggcgggagtcaccctgcctgggcccctccttttgatgagtcatcagttttcattcccgcacgaggctctagcccctggtaccagcttagttgctcaatgggctgtgtttgttctggagcccagatggactgtggccaggcaagtggatcacagacctggccggcctgggaggtttccacatgtgaggggcatgaggggggctcaaggaggggagcatcggggagaggagcgcactgggtggaggctgggggtcccagcaggaaatggtgagacaaagggcgctggctggcagggagacagcacaggcaggccctagagcttcctcagcacagctggactctcctggagaccttcacacaccctgatatctgggccccgcgctacgagggtgctttcactggtctgcactatgccccaggccctgggattttgaacagctctgcaggtgactgaaaggtgcggccaggctggggaacgacctggtttcagccccagccccgccactgactgactttgtgagtgcgggcaagtcactcagcctccctaggcctcagtgacttccctgaaagcaaaaactctgcaaaggggcagctgggtgctggctcacacctgtaatcccagcactttgggaggctgaggtagacaaatcacttgaggccaggagttctagaccagcctggccaacatggtgaaaccccatctctactaaagaaaaaaaaaaattagctgagcatggttgtacatgcttgtaatcccagctacttgggatgccgaggcgggaggattgcttgaacccaagaggtggagtttgcagtgagctgagattgtgccacactgcactccagcttgggtgagagtgagactccatctcaaaaaaaaaaaaaaaaaagagagaatcccactttcttgctgttgtgatggtggtaagggaacgggcctggctctggcccctgatgcaggaacatggagctgatccaggacacctcccgcccgccactggagtacgtgaagggggtcccgctcatcaagtactttgcagaggcactggggcccctgcagagcttccaagcccgacctgatgacctgctcatcaacacctaccccaagtctggtaagtgaggagggccacccaccctctcccaggcggcagtccccaccttggtcagcaaggtcgtgccctcagcctgctcacctcctatctccctccctctccaggcaccacctgggtgagccagatactggacatgatctaccagggcggcgacctagagaagtgtaaccgggctcccatctacgtacgggtgcccttccttgaggtcaatgatccaggggaaccctcaggtgcatggctgggtcctgggggtaagggaagtggaggaagacagggctggggcttcagctcaccagaccttccctgacccactactcagggctggagactctgaaagacacaccgcccccacggctcatcaagtcacacctgcccctggctctgctccctcagactctgttggatcagaaggtcaaggtgaggccgggctcaatggttcacacctgtcatcccagtttgagactgaggagggaggatcccttgaaggcgagagatggagaccagcctgggcaacattgctgtagagatgacatcccatctctacaaaaataaaattaacaacctggtatggtggcatagactgttcccagttacttaggaggctcagcggggaggactgtttatgcaaataggaagctgcaatgagccctgatgatcctgctgctgcactccagcctgggcaacacagcaaaaccatctctacgaaaaaaaaagttcccactgactggcaaggaaagccaggaaggggggctcaggtgccctctcagccatgtacctgttcttctggaagggcctcctcgcttctgccaggctcatcacatctttttttttttttgagacagagtcttgctctgtcaccctggctggagtgcagtggcatgatctcagctcactgcaacctccgcctccccagttcaagtgattctcctgcctcagcctcctgagtagctgggattacaggcgtgtgctaccacacccggctaatttttgtattctttttagtagagacggggtttcaccatgttggtcaagtggatctcaaactcttgaccttgtgatcctcctgcctcgacctcacaaagtgctggaattacaggcgtgagccaccgcgcctggccctttttttttttgagacagtttcactcttgttgccgaggctagagcgcaatcgtgtgatctcggttcactgcaaccaccgcctcctgggttcaagcaattctcctgcttcagcctcccaaggagctgggattacaggtacctgccaccacgcccggctaattttgtatttttagtagagatggggtttcaccatgttggtcaggctggtcttgaactcctgacctcaggtgatctggccaccttggcctcccaaagtgccgggattagaggcatgagccaccacgcccagccttcatcacatcttgagagaggacactgtctgcctcttgctctgatgagggtctgatgcaaggatagtgagtctctacagtgcacacttaagaaaggcagcatgtgggtgctcacaggtcagcggaggagggggagctggtggggaccaggcatgccttgctccagatcaggatatgatggcattggtgcagattatattagtatagaatatggtctcaggaaccaggcaggactttggcttccgagcagggttcagatcccagcttggccctacctgtgcagtgagatctcaagcaagtcagcctctaagcctcaggttcctcctttgccagttcaacagatgagctggcctggggtgggctgtgtggtgatggtgctggggctgggtcctctgcccctgcaggtggtctatgttgcccgaaacccaaaggacgtggcggtctcctactaccatttccaccgtatggaaaaggcgcaccctgagcctgggacctgggacagcttcctggaaaagttcatggctggagaaggtgggcttgactggaggaaggagggtgtgaagccgaggggtggtggctataacgtacagcaaccctgtgtcggtgccccctgcccgcttctctagtgtcctacgggtcctggtaccagcacgtgcaggagtggtgggagctgagccgcacccaccctgttctctacctcttctatgaagacatgaaggaggtgagaccgactgtgatgcttccccccatgtgacacctgggggcaggcacctcacagggacccaccaaggccacccagccccgtccctgggcggctcccacagcaagcccggattccccatcctacctccctggcccaggcccccccactgcagccccacctggcagcaggctcggcacagctttcatcttctgcacctgagtcagctgcatgggtggccacggatcagatacttagtcctattgcttatcctcaccaaagggtgtgccacccagggccacagtcatggaagaagaccatcccggtcctcacccataggcgccaagccctgttcatgatgggatcacagggcagagatcaattcattttactccagagactagggccccaggggttgaggctctttggggtttctaggggaagtggccagatcccctctgaggttagagagggggacccgttttgttttgctccactgaggagccctctgctgctcagaaccccaaaagggagattcaaaagatcctggagtttgtggggcgctccctgccagaggagaccatggacttcatggttcagcacacgtcgttcaaggagatgaagaagaaccctatgaccaactacaccaccgtcccccaggagctcatggaccacagcatctcccccttcatgaggaaaggtgggtgctggccagcacgggggtttggggcgggtgggagcagcagctgcagcctccccataggcacttggggcctcccctgggatgagactccagctttgctccctgccttcctcccccaggcatggctggggactggaagaccaccttcaccgtggcgcagaatgagcgcttcgatgcggactatgcggagaagatggcaggctgcagcctcagcttccgctctgagctgtgagaggggctcctggagtcactgcagagggagtgtgcgaatctaccctgaccaatgggctcaagaataaagtatgatttttgagtcaggcacagtggctcatgtctgcaatcccagcgatttgggaggttgagctggtaggatcacaataggccacgaatttgagaccagcctggtaaaatagtgagacctcatctctacaaagatgtaaaaaaattagccacatgtgctggcacttacctgtagtcccagctacttgggaagcagaggctggaggatcatttcagcccaggaggttgtggatacagtgagttatgacatgcccattcactacagcctggatgacaagcaagaccctccctccaaagaaaataaagctcaattaaaataaaatatgatttgtgttcatgta

SEQ ID NO: 59 - DNA, 18875 bp, Homo sapiens
tcccacccccagcctggggcctctgggagccttggtcctgagcagccaacacaccagcccagacagctgcaagtcaccatggacgctgaaggtaaagggacactctctctgccatgtccctgcacccatccccccactgcctacccctgcccccaccctggcttgtctcagccccttgttgcctcctctggagtcatctctcctctggtcccgccatcgactcccttacctaccccatgtccctgcagccttgctcaacccccagaggccccttctcactcttctttctcctgtgttgagtccccaaggagctctggggaaggaaggggcttaagccctagaaaagggcagggtggcctggaggaggtggcgtctcctgggggcagtgggggccggaagtgggaggctggttgggggagcagcatggacttctgctctcgctggtagctcgggagaagcagagacaaagtcctgtcccttctgcagctgggtgggggagggggcttgagtcccgtgattccctgcctggagggagctgtatgcaaactgttggggtgatcagtcccaacccccaaccatgaagtccggtggcaacaaaggaatgagaaaagacaagttaagatttaaagcagccccagggggccagttgctaaagtgaaggctgcagagccctggttgcctgataatttattgagtacaatcttttgatctaagaagcagatggtacggggtgaaacggtgaaggtgggggtgtgcgcgtcatttgaaagatgtatagccgtggtggtttatgtgaatttcctttaagctcaaagcatatgtctaactactaagataatcttttttttttttttttttgagacggagtctcgctttcccccaggctggagtgcagtggcgtgatctcggctcactgcaagctccgcctcccgggttcatgccattctcctgcctcagcctcccgagtagctgggactacaggcgcccgccgccacgcctggctaattttttgtatttttagtagagacggggtttcaccatgttagccaggatggtctcatttcccaacctcgtgatccgcccgtctctgcctcccaaagtgctgggattacaggtgttagccaccgtgcccggccaactaagataatctttaacttattgggctgcagctggtgggagtgggttttacaaggagccaggatgtctggtcacattccaacgcttcaaggaagtgtttcagcccagagcattctgtgtaaagccgcagagcaggtcatgttcactggcctggggacacaatggcaataaggaggtgattctcctcagaggccccctatggtgttccataggtgtcctacacaggggtggctgactaaactggcgccccgtaaacccttccaccagcacaaacccaggggtccatgctctacgctcagaaggctccaccagggatggggctgtgtgaccatgggtgggtcctggcttctcagagtcccgttttcttccatctgtaaaatgacaataatagttccctgctctggcccgccacggtggctcacgcctgtaatcccagcactttgggaggctgaggtgggtggagcacttgaggtcaggtgtttgagaccagcctggccaacatggtgaaaccccgtctctactaaaagtacaaaaattagccgagtgtggtggtgcgcacctgtaatcccagctacatgggaggctgaggcaggagaattgcttgaaccccagtggcggaggttgcagtgagctgagaccaggcctcagcactccagcctgggcgacagagcgagactccatctcaaaaaaaaaggaaaataaatagttccctgctcagaaggttgtggggaggacagaggatgggaggcacaggtgcttagaccctcctccatgtttgaggtgcctgctggccccatacacccggtccctctggctccactgtggaaccagctctcaggggtcccatgcaggatgccacgccaaacacctttcaatctccattgtgtctttctcttttgaaacaacgccgacctggatgtgaatcctgactgccactcagcagcagtggaaaccctggcaagttttgtaacctgtagaagcccgtttccacatctggacaatggagttggtggcactggtctcacggggttgtaatgaagattaaataccttagcagatgtcaaggggtctcgacctgattccttcagagccaggattctttactgagggatcagggatgggctctgggggagttcatgaaccccagaatttgcaggtgaaattgtgtgtctttgtgagaacacggttacgcatttttctgggaaggagatccataattttcatcagatccagattctttttttttttttttttttttgagacagagtctcgccctgttgtccaggctggagtgcagtggcatgatcttggctcgctgcaacctctgcctcccgggttcaagcgattctcctgcctcagcctcacgagtagctgggactacaggcataaaccaccatgcccggctaatttttgtatttttagtagagatggggtgtcaccatgttggccaggctagcagatccagattctttttttttttttttcgagatggagtctgactctgtcaccaggctggagtgcagtggcaggatctcggctcactgcaaccttcacctcccaggttcaagtgattatcttgcctcagcctcacgagtagctgggactacacgtgcttcaggcacttgctgccatgtccagctaattttgtagttttagtagagacagggtttcaccatgttggccaggatggtctcgatctcttgaccttgtgatctgcctcctcggcctcccaaagtgctgggattacaggtgtgagccaccgcacccggcctcttttgttttttagacggggtcttgttctgtcacccaggctggttggtgtgcagtaacataatcatagctcactgtttgtagcctccaacttctgggctcaagtggtcctcctgcctcagcctgtggagtagctgggactgcaggcgtgtgccaccacacctggctaattaaaataaattttttttttttttagagatgggttcttgctgtgttgcccaggctggtctcaaactcccagcctcaagcgatcctccaacctcagcctcccaaaagtgttgggattacaggcatgagccaccgtgcctggctcaaatcttttcatatgtgaacatctcagcatgttttctttctttcttttttgagatggagtttcgctcttgttgcccagactggagtataatggcgtgatcttggctcactgcaacctctgcctcccaggttcaagtgattctcctgcctcactctcccaagtagctggggatacaggtgcccaccaccatgcccagctaatttttttgcatttttttttttagtagagatgggttttgccgtgctggccaggctggtcttgaactcctcacctcaggtgatccacccaccttggcctcccaaagtgctgggattacaggcgcaagtcactgcgcccagcctcatcatgtttttttcttaaaagataaagacttttctttttactacaaccacaatactattgtcaaaactaaactttaaaaatttccttggtgttatcaaacattcaatgtccagattccagtggtttcataaatagcctaatttgcttttagtttgtttgaattaggatctaagtaaaatctacactttgtgattggttagtatgttttaagagtctttgaaactttatttttttgattaaaaaatgtttaatttagagataggggtctcactatattgcacaggctggtctcaaatgccccaaagtgctgggattacaggtatgagccaccacacctgactgattctttttttttttttttgagatggaatctcactctgttgcccaggctggagtgcagtggcgcaacctcggctcactgcaacctccgcctcccagattcaagcgattctctcaccccagtctcccgagtagctgggattacaggcgtgcaccaccacacatggataaattttgtatttttttagtagagacagcgcttcaccatgttgtccaggctggtctcgaactcctgacctaaggtgatcttaggcccaccttggcctcccaaagtgctgggattacaggtgtgaccaccacgcccagccaatatgtggtcttatgagagcattggttcttttttttttttccctgaggcagggtctcaccctgttgcctaggccagagtgcagtagctccatcatagctcactgcagcctccaactcctggactcaagggatcctcccacttcagccttctgaatagctaggactacaggcgtgtgtcaccatgcccagctaatttttaaaattgtttttgtagagatgggttctcactatgctgcccaggctggtctcaaactcctggcctcaagcgatccttctgcctcggcctcccaaagtgttgggattacaggcatgagccaccgcccctggccgagcattgattcttgatcctcatgtgcatctgagtcacagagcagggtgggggctggctcttccccaacctggatccctggaaactacccccagagattctggttcactgggttggaatgggcctgagcatctgaaagtttgaaaagctccctgtgattctggtgtgcagcccaggcagaggccccactgtgtccacttctcttgaaaggagtggttcacaccaacacccccacttccctacctcccgtgcgctcctcgagcatgacaatgtggcttctgcccccgacacatggcacaaaaaccgctctggcacaggcctcacagttgctaagtgcagagccccatcctcagtcttccttctatttacttctgctcacctcccaaaaccctcttctccttcccaggtacccactcctgatgatgcttctctttttgttggacatgccctgtgggttctttatcttattattttattttagagaccgtggcttgctctgtcacccaggctggagtgcagtggtgcaatcacaggtcactgcagcctccaactcctggactcaagccgcagcctcccgagtagctggcgagtagctgggactacaggcgtgcacccccatgcccagctaactttttctttttttcttttgttttttgagacggagttttgctcttgttgcccaggctggagagcaatggcactatctcggcttactgcaacctctgcctcccaggttcaagcgattctcctgcctcagcctcctgagtagctgggatcacaggcgcccaccaccacgcctggctaatttttgtatttttagtagagacggggttttgctatgttggccccggagttcaatttttgtatttttagtagagacggggtttcaccgttttcaccaggatggtcttgatctcctgacctcgtgatcctcccgcctcggcctcccaaagcgctgggattacaggcgtgagccaccgcgcctggccacggcagcatctcttctgaactccagagccattccctaccaccctctgggcaccaccatccacatctcctgctgccgcctcagccttaacctctgcaaaaccaaatccgttctttctctcgagctctgcagaagctaagctgtttcaccaggccacgattcaggaaacgctttgggattcagcttctgttcttgtgaaatgggaagaatccctgtggtgagctccagatgagagcacaaaggggaacaggggtgcccgcggctggcacgccatggctggcacgccatggcactcagtggggtcaccgccccctcctgctgtcccacctccaccctgcctgctcttctcctggaatgactccttctgccagctctcagctacccaggccagaggcccaaggctcccacatctctttagctactaattctggtagatccccttttggaaatagccctcaaatctaccccagagctactgtcaaagttcagggctccatctcttttggtttttttgaaaatattttttcaaattaattatttgttggccgggcgcagtggctcacacctgtaatcccagcactttggaaggccgaggcaggtggatcacctgaggtcaagagttcaagaaccagcctgaccaacatggtgaaaccccatctctacaaaaatacaaaaattagccagggatgatgctgcatgcctgtaatcccagctactcgggaggctgaggcgggagaaccacttgaacccgggaggcagaggttgcagtgagttgagatcacaccattgcactccagcccaggcgacagtgagactccgtctcaaacaaaaaaaaattatttgtggaggcagggtcccactatgttgcccaggcctcaagtggccctcctgccttggcctcccatagcactgggattacaggtgacagccaccgcgcccagcctactttttgtctggccaagactacctcagccttcttttgcctcccaatctgtctccagttggtggctgaagtgacccttctggagcaaaaccataatcatatcactccctcttttaaaattctgtgatgggtcaggcatggtggatcacacttgtaatcccagcactttgggaggccgaggtgggaggactgcttgagcccaggagttcaagaccagcctgggcaacatagcgagaccccccgtctctacttaaaaataataaaataaaatgaaaagaaaattttttttgagatggagtttcgctcttgttgcctaggctggaatacaatggtgggatctcagctcacggcaacctccacctcccgggttcaaccgattctcctgcctcagcctcctgagtagttgggattacaggcatgtgccaccatgcccggctaattttgtatttttagtagagacggggtttcaccatgttggtcaggctggactcgaactcctgacctcaggtgatcggcccacctcggcctcccaaagtgctggaattacaggtgtgagccactgtgtccggccaataaaatgaaattttatgatggcttctgcgatctggccaaattcctcagctaaatagtttagttctttctccctgtggcctctcctcccaccatgtcacctgtgaatcccacactgcccccaccccgacactgtctgcaggtgaacagatcagttttctcagccccaaatgtcagccccaccccacacctctgcctggcaaacatcactcaccggtcctcagagacacctagtcatttattccatgagtccaccacacttgagaaacgcttcttttcttcgcgagcacgcctaccctgtgctagacagtgttcctaagggctttcaaacataaagtcttttgttttttgtttttgagacgcagtcttgctctgtcgcccaggctggagtgcggtggcacaatcttggctcactgcaacctccgcctcccaagttcaagcaattctctgcctcagcctcccgagtagctgggattacaggcgctcggctttttatttttttaattttttttattttttgtatttttagtagagacggggtttcaccatcttggccaggctggtcttgaactcctgacttcaagtggtccacttgcctcggcctcccaaagttctgggattataggcgtgagccactgtgcccagcctccaactcctggccttgtcttcctcccaccctggcttcccagagtgctgggattaacagacatgagcctccacacctggcaacttctttccatttttcactgattctctgacacatcctcattgagcacctgcactgtgtggggtgttaataattgctaggcatggaggcaacagcgtgggcagctctttctcttacttgtcaggctttagcctatgctgttgcaggactgtgccttggcctggaagccccttcccttatcctcatccccaatctcccccttcagctcttgttcctcttgcaggtcttcccttaaacatcacttcctcagcaggggcctcacagacacgcccggaggttagatcctggtccctctgtgcttcctgttcttcccccatcatcacagtctacggctgtttcctctcgatgggcaaagactgtgtctggccattgagttttctgctatatccaagtgcttcgtatactgaaccatataaatgtgctgcttttattggtcaaaacggccaaatattggcaattttatattggttagcttcatagtatgtgagctaggatacttatcccatcagagaggttgcgtagcacagtgaatcagagcccaggctctggggccgcacacctgaggtccagccctggctctgccacttgtcactaagtgattgtggactggagacaaccctcaggggccttgggttcctaatctgtgacagggatgacaataatgacctcctcgtgctgttataaaatacagaaatgtactaaaatacaaaaattggccaggcatggtggcacatgcctgtaatcccagctactcaggaggctgaggcaggagaactcaggaggcagaggctgcagtgagtctacttttattgccaaagctcgggggtccatcccttttccattgcatgccactgcactccagcctgggcaacaaagtgagactgtctcagaaaaaagaaaaagaaaaaaatgtttaaaagccaggagtttgagaccctgtctctattaaaaaaaaaaaaaattaccttggcatggtggagcagctactcaggaggctgaggtgagaggaccacatgagcccgggagttcaaggctgcagtgagccatgattgcaccactgcattccactctgtctcaaaaagaaagaaagaaaaaagtcaagagaactggagctgaaaccatgaaaggtcagttttcagcaggagagtgatcaaagaaaaccagaactagacagtcgttaaaatagcaaaaacatattgcattccagactattgctgtaggggaagagtgaccttagatcagaactgggctgaactctacaccatgggggttatagccaacgagcagagttgggggcagtggatgggacattaccatgagaaagcactgggggttgggggtattctgacaagaccaacctaaagggattcttgctgagggcaggccaaggtggtcagacagcgcctgggggagagtggagaatgaggacccccatcagggatcgggggcaatcagatgtggaggatgagggactggctaagctgacttagcagtattcttgctaaaattggacgatgcagaggtgaacacggaagtccaaggcctaactggaaaagagctgagggaacctgagtgaggtttggctatagacagaacctctgagtgagcccatcaaagttactttatttatttgtttgtttattaatttatttaagacagagtctcactctgtcgcccaggctggagtacagtggtgctatctcggctcactgcaaactctgcctcctaggttcaagcaattctcgtgcctcagcctcccgaggagctgggattacaggcacatgccaccacacccagctaagttttgtgtttttagtagggacagggttttgccatgttggacaggctggtcttgaactcctgacctcaggctaattttttgtttgtttttattctctttttttttttttttgagactgagtttcgctcttgttggccaggctggagtgcaatggcgcgatattgactcactgcaacctctgcctcctgggttcaagcgattctcctgcctcagcctcccgagtagctgggactacaggcgcacaccaccatgcccggctaatttttgtatttttaggagagacggggtttcataatattggtcaggctggtctcaaactcctgatctcaggtgattcgcctgcctcagcctcccaaagtgctgggattacaggcgtgagccaccgcgcccagccttttgtttgtttttaaatttaactttttttttgagaccgaattgcactctgtcacccaggatggattgcaatggcgcaatctcagctcattgcaacctctgcctcctgggttcaagagattctcctgcctcagcctcccaagtagctgggattacaggcgcctgccaccacagctggttaatttttgtgtttttagtagagatgaggttttgccatgttggacaggctggtcttgaactcctgacctcaggtgatcaacccaccttggcctcccaaagtgctgggattacgggcatgagccaccatgcccggccttaacttttatcttaagttcaggggtacatgtgcaggtttattatataggtaaacttgtgtcatgggggttgtacacattatttagtcacccaggtattaagtttagtacccattagttatttttcctgatcctcttgagggaagagagagaccctctcatattgtttcatactcagaaaaggaaagagaagcgaaactaaaggcaggtagcctggtgcctaggaaccagaccggaaaccaaggaaccagacccgaaatcaggcctgggcgtgcctgacctaagcctggtagttaaaattcgacccctgacctagcaactgttgttatctatagattccagacattgtatggaaggacattgtgaaacctcccgttaggttctgtttcactctgaccaccggtgctcgcagcccctgtcacgtaccccctggcttgctcaatcacgaccctctcacgcggacccccttagagttgtgagccgttaaaaaggacagaagttgagcacctgaagagctcggattttaagacgctagcctgccaatgctcccagctgattaaagccactcccttcactatcttggtgtctgaggggttttgtccacagctcgtcttgctacacttgccctcctccaaacttccgccctccaataggctccagtatgtgttattcccctctatgtgtccatgtgttctcatcatttagctcccacttataagtgagaacacgcggtatttggttttctgttcctgcgtttgtttgctaaggataatggcctccagcgccatccatgtccctgcaaagaacgtaatctcattcttttttgtggctgcatagtattccacggtgtatgtgtaccacactttctttgtccagtctagcattgatgggcatttaggttgaatcatgtctttcctatggtgaatagtgctgtgatgtgtctttataacagaatggtttacattcctttgggtatatacccagtaatgggattgctgggtggaatggtatttctggtttttggtctttgagaaattgctgcactgtcctccacgatggtttaactaatttacactcccaccaacagtgtataagtgatcctttttctttgcaacctcgccagatctcggtggtcaactcctcccactccccaggcaatgctgatttgctctgtgcctatagttttgcctttcccaggatgctgcgggaatgggatcatacggccttttggatctggctccttttagttagactgatacatttgagacaggtccctattgttgtgtgtatcagtagttggtttcttctttttttgagatggattctcagtctgtggtccaggctggagtgcagcggcatgacctcagctcactgcaaactccgcctccctggttcaagtgattatcctgcctcagcctcccaagtagctgggattacaggcacatgccaccacgcccggctagtttttgtattttttcgtagagatgggatttcaccatgttggagaggctggtcttgaactcctgacctcgtgatctgcccaccttggcctcccaaagtgctggaattacggcgtgagccatggtgcccagcctgcatcacaggttgtttacccaatactcaccagttgcagaattcaaatccattttttaaaaaatcagcctgaaaaaaaaagaaaaaaatcagtctggccaggcacggtggctcacgcctgtaatcccagcactttgggaggccaaggcgggaggatcacctgaggtcaggagtttgagagcagcctggccaaaatggcaaaaccctgtctctactaaaaatacaaaaattagctgggcgtggtggcgggcacctgtaatcccagctacttgggaggctgaggcagaagaatccctggaacccgcgggacggaggttgcagtgaggtgacatcaggccacttcactccagcctgggcaaaagagtgaagctctgcatcaaaaaaaaaaaaaaaaaaaaaaaaaaaaaatcagggtgggcacagtggctcactcctgtaatcccaggactttgagaggctgaggtgcgaggattgcttaagcctgggagttcaagacgaggctggggaatatagtgagacccccatctctacaacaaaaaatatacaaaaattagccgggcatggttggtgtgcgcctgtagtcccagttccttgggaagctgaggcgagaggattgcttaagcctgggcagttgaggctgcagtgagccatgatcgtgccactgcactgcacctagtttgaatggagtgggagtgggggattaggctctcctccctgccgtttgctcccaggccttttccgtagctggatgtgaccaacagagacagtgcccagcctcagtatagctagctcttagtggagggacaggagccatctggggcagatgtgggagagaatgtggcgaaggagagccgggtgcagtcaaggaggcttgtggctcggaggggaggtggggtgagtgagtggagactcagcagcttggctttggggaagtagacaagagagggccctctttggagagcggagcaagccaggatgtctggccttcacttccacttggaacagaagtgtgctgtgtgcgcgtgcttgtgcgtgtgcgtgcacgtgtgtgcgcgctaaatcaaacaccctcgctggctctgtgttcccctcaaggggaagccaactccacggatggcgggggtccattaggctgcaggtcttctccctgccgatagatggcgctgttgcaccgcgcctgggtttgcctctgcccgcagccatgcagggcccatcacgggctatgcctaccgcgcgaggggccttcaccatgtccactatccttatttatttatttatttatttatttatttattttttaagtgtgggtactggccgggcgcggtggctcacgcctgtaatcccagcactttgggaggccgaggcgggcggatcacgaagtcaggagattgagaccatcccagctaacacggtgaaaccccgtctctactaaaaacacaaaaaaattagccaggcgtggtggtgggcgcctgtagtcccagctactcgggaggctggggcaggagaatggcgtgaacccgggaggcggagcttgccgtgagccgagatcgcgccactgcaacagaacgagactatctccaaaaaaaaaaaaaaagtgtgggtatatagtaggtgtatatatttatggggtgcacattgataaaggcatgcaatgcataataatcacatcatgggctagatgcggtggctgacgccgagatcgcgcctctgcagtcgccaggccactgcaggcgccacagtggcgacagagcgagactccgtctcaaaaaaacaaataaataaataaatcaggttaggccgggcgcagtggctcacgcctgtaatcccagcacttgggaggcggaggcgggcgaatcacgaggtcaggagttccagaccagcctggccaacatggtgaaaccccgtctatactaaaaatacaaaatttagccgggtatggtggcaggcgcctgtaaccccagccactcgggaggctgaggcaggcgaatcgcttgaatccggaaggcggaggttgaagcgagccgagatcactccattgcactccagcctgggcaacaagagtgagattctgtctcaaaaaaaaaaaaaaaaaattacatcatagagaatggggtgtccatcccctcaagcatttatcctttctgttacaatccaattgcattcttttagttatttcgaaatgtacagttattattgactgtagtcaccctgttgtgctagcaaatagtaggtcttattcattctttctattttttttgtacccattaaccttccccacctccccatcatccttttttttgttttgagacggagtcttgctctgtcacccaggctggagtgcagtggcacgatctcagctcacttcaacctctgcctcctgggttcaagcgattctcctgcttcagcctcccgagtggctaggattacaggcctgcgccactatacttggctcatttttttcggggttttgccatgttggccaggctggtcttgaactcctgacctcaggtgatccacctgcctcagcctcccaaagtgctgggattacaagcatgagccactgtacccagccccatcatcctcattttatttattttttatttttattactatttttttaggtggagtcttgctctgtcacccaggctggagtgcagtggcgtgacctcggctcactgcaacctctgcttcccgggttcaagcaattctcttgcctcagcctcccgagtagctgggattgcaggcgcctgccaccacgcccggctaatttttgtatttttagtagagacaggagggttttaccattttggctaggctggtctcaaactcctgacctcaggtgatcctcccgccttggcctcccaaagtgctgggattacaggcgtgagccaccgcgcctggccagactgattttttttttaagtgaatttgaaagctgcaactggtgagtattggataaacaaactgtgatgggattgcaggtgtccacccccaagcctggctaatttttgtatttttagtagagaccatgttggccaggctggccttgaacccctgacctcaagtgatctgcctgccccagcctcccaaagtgtttgggattacagtcgtgagccaccgcacccggtcagaagtttaatttttttttttgagacggagtcttactctgtcaccccggctggagtgcagtggcctgatctcggctcactgcaagctccacctcccaggttcacgccattctcctgcctcagcctctggagtcgctgggactacaggcgcccgccaccaagcctggctaattttttcgtatttttagtagagacggggtttcaccatattagccagaatggtctcgatctcctgacctcgtgatccgcccgcctcggcctctcaaagtactgggattacaggcgtgagccaccgcgcccggcccagaagtttaaatttaactaggtgcccagtgatctcatcaagcccacagcactccctcaccctcgcccccacaacctcccttccccccacgccccccttcctcaccgcagtcccccccctgggacccctagatcttgaggctgatgggccagttcccagtttcactggttgttaaatattttgacagtgacccctgacagcaggagaggcagccaaactcaacagctgttctctcttccccccaggcctggcgctgctgctgccgcccgtcaccctggcagccctggtggacagctggctccgagaggactgcccagggctcaactacgcagccttggtcagcggggcaggcccctcgcaggcggcgctgtgggccaaatcccctggggtactggcagggcagcctttcttcgatgccatatttacccaactcaactgccaagtctcctggttcctccccgagggatcgaagctggtgccggtggccagagtggccgaggtccggggccctgcccactgcctgctgctgggggaacgggtggccctcaacacgctggcccgctgcagtggcattgccagtgctgccgccgctgcagtggaggccgccaggggggccggctggactgggcacgtggcaggcacgaggaagaccacgccaggcttccggctggtggagaagtatgggctcctggtgggcggggccgcctcgcaccgctacgacctgggagggctggtgatggtgaaggataaccatgtggtggccgccggtggcgtggagaaggtgctggtcctgcctgtccctggtccaaccccaccctcagcacacccctcccctcccctcccctctccagagcctccagccatgaccgggtgaacagccatggcctggagtcagcaacacaagactcttcccacctcagctcctccatctgagctgggctcagttgagctcatccagctaagctaaaggggagctgggcctgcttttctttttctggagatggggcctcagtctctccagtagctggatatacaggcatgctccaccccactggctaatttttgctttttttttttttttttttttttgagatggagtctcactctttcacccaggctggagtgaagtgatgcaatctcggctcactggaacctctgcctcctgggttcaagcaattctcctgcctccgcctcccgagtagctgggattacaggcgccagccaccatgcccggctaatttttgtattttttagtagagacagggattcaccatgttggccagactggtctcaaactcctgacctcaggtgatccacccacctcggcctcccaaagtgctgggattacaggagtgagccactgcacccagctgccttttttttttttttttttttttttgagatggggtctcactatgttgcccaggctggtctcaaacttctggactcaagtgatcctcccaccttggccacccaaagtgctgggattataggcataagccaccatgcctggttttggaattggttctttatctttgttctgctgctgcgtggcgtgatgttcaagagcaaaggacaacacaggggaagccagtgtcactggcaccacagccttgagcccatctctctagccctctgcaccttatttcccatctgtgaaatgcccttaaacaccccttctaattttaatattctgagtcaaattgagctcaggtccaaatgccaaatattgctgatattcatccactttttgacccacaaaagtggtcattttaacctacaataaaacatcctggctcagtggctcatacctgtaatcccagcactttgggaggcccagttggggggattacttaagtccaggagtctgagaccagcctgggccatatagcaagattctgtctctacaaaaaattaaaaaattagccatgcttgtgggcaagcccctgtagtcccagccacttgggaggctgaggtgggaggatcacttgatcccaggaggtggaggctgcagtgaactatgactgcactgaactccagcctgggcgacagagcgggaccctgactcaaaaacaaaacagtggccaggtgcggtggctcacgcctgtaatcccagcactttgggaggctgagatgggtggatcacgaggtcatgagttagagaccatcctggccaccatggtgaaacgtcgtctctattaaaaatacaaaaattagctgggcatggtggcacgcacctgtagtcccagctactcgggagactgaggtgggagaatcacttgatcccaggaggtagaggctgcagtgagctatcattgcaccactgcactccagcctgggcgacaggttgagaccctgtctcaaaaacaaaacaaagcaaaaacaaccccaaagtctggtttccttattaaccccaagttcatggtccacccgaagcttttcaaatgtcagtcccggctccccgcgccccagctgcagtgctgggccctatcgtcaccctcgccctcccggctccctgcgccccagtgccaggtgctgggcccagtcctcacccttgtcctcccggctgcccagcaggcggtgcgggcggccagacaggcggctgacttcactctgaaggtggaagtggaatgcagcagcctgcaggaggccgtgcaggcagctgaggctggtgccgaccttgtcctgctggacaacttcaagccagaggtaaggtgggctctgcctccggggagggatctgtggtgggctcttacctccccttggcttgtgtcccgcaggagctgcaccccacggccaccgtgctgaaggcccagttcccgagtgtggctgtggaagccagtgggggcatcaccctggacaacctcccccagttctgcgggccgcacatagacgtcatctccatggggatgctgacccaggcggccccagcccttgatttctccctcaagctgtttgccaaagaggtggctccagtgcccaaaatccactagtcctaaaccggaagaggatgacaccggccatgggttaacgtggctcctcaggaccctctgggtcacacatctttagggtcagtggccaatggggcacatttggcactagcttgagcccaactctggctctgccacctgctgctcctgtgacctgtcagggctgacttcacctctgctcatctcagtttcctaatctgtaaaatgggtctaataaaggatcaaccacatggggttctgcggtgataatgagcacatagtgaggggtcagcaaatgtcagaagttacctgggacagccgggcacgatggctcacacctgtaatcccagcactttgggaggctgaggcgggaagatcacttgagttcaggagtttgagaccagcctggccaacatggtgaaaccccatctctaccaaaaatagaagaattagctgggtgtggtggcacgcgcctgtaatcccagctacttaggaggctgaggcaggagaatcgcttgaacccaggaagtggaggttgcagtgagctgatggtgccactgcactccagcctgggtgatagagcgagactctgtctccaaagaagaaa

SEQ ID NO: 60 - DNA, 3557 bp, Homo sapiens
ttttgtttacattgtatttattttcatgttttaccttctattgatggcaaatgagactggttttccatttacagaagtgatacaaaagattcctgttgcaataatttcattaagtgaataatgagccaatttaaagaaaaatataaagcaaataattgtacagatggtaaactaatatggcaaaatcactaatattcaaggctgaagtttggccgggcatggtggctcatggctgtaatcccaacactctgagagatggggatgagtggctctctcgagcccaggaattaaagaccagcctgggcaacatagcaagaccctgtctctaaaaaaaaaaaatagccaggtgtggtggtacatgcctgtagttccacctactagggagactgaggtgggaggatcacttaagcccaggagttcaaggccgcagtgagctgagattgtgccactgtagtccagcctgggcaacagagtgagaccctgtttcaaaaacaaaaaaaagtggccgggtgcagtgctcatacctgtaatcccagcattttgggaggctaaggctgctggatcacttgagcccaggagttggaaacctgcccaggcagtatggtgagaccgtgtctctacaaaaaaaatacaaaaattagctgggcgtggtggtatgcacctgcagtcccagctattctagaggttgaggtgggaggatcgcttgagcctaggagttcgaggctgtagtgagttgagattgtgccactgcactccagtctgggtgacagagttgagattctgtctcaaaaaaaaaaaaaaaaaaaaaaaaaagacaaagtttggaaaattaaacccccagggaaatggaaactacatctgctgctcacccacctgcctgcctctcctaaagggaagattgggtacttggggtcccatttctgtagggtggagcattataagtaagcctagcttgtggcaaatctgtctctctggacactccagcaagctggaagggacgatgatcagaggtcacagtttgggagttgccctgctctaggacaacgctcctctccacattggatgaaactcagtttcccctggccatggccttcctcaccatggagtggtgagggtccgaggctgagacgtgtgcagatggaggagaatgggcagaggagcctgtgggttttctctgactctaggtccccactccagcaagacagcgccgctgcagcttggcccagcaagttcctccttgcagtttgggggtcaaagccacagttcatatgaaacaaaatgttcctctgcctggtctggtcctctctttgtgtattttcctagaggacctcacagtgggtgagtggccaaggagaacaggatttgtggctctgggaaactggattcctgtcatctcctgccagctgtcatcgccacaccgaggctgttcagcaccgcaggacccgttctctttggtattggtggcttcggtaaacactgaaagaaggtggaggtggctggtcgatgccatttcctgactatctagtaccttgggttcttcatctggatgcgatcttgaaggcttctggcctggcattggctccacccccaggtctctgagccacagcccaggtagctgagcagaggcactgctgggcttcccctagtccacatagcctggccaccacccagacccggggagggggactccaggtggaaggagcctgggaagggcatcttcgctggggcagtctcaatcctaatgctggatcctggggtccccggtcccactgaggcaaggcctgcctcggggatctctggggaaccctggggattcagaaccccacactggtccggccttcacgcttccagaaagctgagatctgctccaaggtgacccgtggctggaggccccactcaggatccgggctccctggccgctgcctcctggcctgggggctcccaaactggacgctggcctctggcctctgctcgggttcagcccagctcaccaggcctgtggcggggggcctcccctcccagggctggggcccccagaaggtgctccgggctgggacctccagtacggtctgggggcccaagttgctgggagcagaatttggggctgagggggcaggtggggctgttgctcgggcctccaaagtgcccacctgggtgggaggctcaggggcccgatctgtcagcagggggaccgcagagccataccagtcctcagagcgctctcgggcggtgcccatgggctcaatccacagctctcctcctgggcgccacaccagggtgggtgcacggtggctggggtctgggcggagagcacggcggaacaggcgttcagccaacacagcggtggtgaggatgaagagcgcagccagggtggccaggaccagcatgatggggatgcagggcccacagggcagtgagggccatggggctgcttcccatgcggggggcccctccacgcgcccagagggcggctctggagtcaacggcatctgagagacacaggggtgagaagaggaagtaaatgaggcagagggggcacaaccaagatgagagagaggcagcaggtgtccaggaaagcctgggagaagggctgggcatgggggctcatgcctggaatcccagcactttgagaggtcgaggcgggaggatcacttgagcccaggagttcaagaccagcctggacacacagtgaaacctcatctctaaaaataatttaaaaactagctgggtgtggtggctcacacctgtagtcccagctacacaggaagctgaggtgggaggattacttgagcccaggagtttgaagctgcagtgaccccagattgcaccactgtcctccagcctgggcaatagagcaagaccctttctcaaaaatgaaaaagaacattctggagagacagagaagcaagagggaccagaaagggtaagcgtgagccaggtggggtgggaggacaggcagcctacctcggggcacagccaggccctcctgcctggctctccaggcctttccagaatccccatttccctcccagaccccagggtgcctcagacaagaaaggtctcaagggcttctttcctccccactcggccccctcaagtcttgctcagacctagagaggaagtggtgggtgaagaaatgagaacctcccctcccactggctcccctgcgtgtgtctcccccaccgcctgccgccagcacctccgctggccccttgaggctccttcgcccctcaccattctcctcggacttgatcttgctctcataggctccacggaatctgctgccgggccgggccgggccaggcctccggaggcgcctctgcacccctcctgggctccccagctttgcccaggctctggcctgtctctatctctcgtttgtctctgcacacctctctgtcccccacatcctccatctgcagggggcctcctgcacccctcaactcaccttgggtcagtccctgggctcctctccctcctagagccactcttcctggtgctggactaagaggtgcaggcttggagggtgcagggcggtccgcctctcagacgtagag

SEQ ID NO: 61 - DNA, 14649 bp, Homo sapiens
ggcgggcccaaggagggagtggaatggccgcgggcggctcgacgcagcagaggcgacgcgagatggcggcagcttcagcggcggcgatctcaggtacttgagcccggcctgggcaaggcgggtaccgacgtctggagtttagtgggagttatgtgtcggagtgtggtccaggctctgcgggttgtcgcggagaggcggccatggcgcaggggcggggagagggggacggtgagagtgtggggtcgcgagccggtcgccccgcctggctcctgccttctccctgtttcctgctctccccttgggtcagtagactcgggtctccggtccaggctcttggcttgaaccccgcgcactttttctttgtgagcttcggtttcttcgtctgtgaaacgggggtcatggcctcatccctggagatcacctgaataagcaagagaagagtggcggacgctctagccacgaggacgagaagaagggagccggaggcgtgtattgggaagggttctgtgtgggacatggtgtttgggtgcagagacatccctgagagatgcaagaggacgggctgaggaacagacccggctgctgctgggtttgagttggcagcgtaagatgctctgcgattacaggaaaacgaaataaaagactaaaatttcctttcactctagcatggaagtgaatgctattttagggttggaaaggctgttaggacacccaaaatcttgtatgtgagtatttgtttacatgtgcctctctaacccggagacttaatcctcgttagtgatgatggtgagcgccatagtaattcactggagccctcgttagcctcgtggggaaacagacatttaggagaatgcctaacacatgtagagctcttgctatgtgccaggcacagttgtaggcattttatggtggtgaaccatttattgtccacacaatgctatcaggttgttactattactgtctttgttttacacaggaaactgaggttagtttgttcagagttaacacaactagtaaatattggggcttgaattcgctctcaaggagtctgagtgtagaacctctgctcttaaccattatgcccaagtacatgttatccctgctggctgagcacagtctccccttacccttcgaagatgcactgtgtccggtgcatggtagatatgaaaatgcctgaatgaataatgtcccttcctcgaggaatttacagtctgtttcaatagagtgtcacatacgtagatgtaatacgaaacacaatgagagatgtgtataaactgagggtgtggaatctgaagtaagcccttgagtattctgggaggacttcattaagggagtgaatgatacttgagatgggtttcaaaggttggataggagtttgccaggccttgactaagaagacaagaacagcaagtgttttcttatttatgatgtaagatgctctcttagctcaatttcctcatcaataaaagggagaagagtgaatgaaatttaggaattgtgaaagaagggaaaattaataattgctagcctggtccaagctcaaggttgcttttatcatgaaagggctagactcttgtgcagtaaataattgtttacatgtggccctcccctcttccctcctaccctggactgtgagccctggggcaggaatggccgtgagccattttcatgatggaaatgaacaagccagtgattagtagtttattcactaaatcttaatttttttcagcaaatacttcttgagggcctactctgcgccaggtgttggggttagaaaggtgagcaggataaaacttgttctcacagttggcagtcaggtggagaaagtgacaaacacgcaatagtggggtgtgacaaatgcttatggaggggctaacatgagctgtggttgcacctgataaagccttagtgtctaccaggaaagggtttttggttttgttttttaagaggagttaaaatgtgtttaccttagtcactccagggtggggtggggagcaatgcagatattctagggagagagattaacgtggacaaaaatccaaaggtgcaagagaacttggagttttgtaggaagtgaaggaaattcatcatgactggtaacttacactgcaaggaaggaaacagagggaatgactagagggcagggagacaccttgctaccaccagcaaggaaggctgtaaagaccatgaccttgggcagaggtagtgcagtgggagtggagagaagtggacttgttcaagagagatttaaagagatagacttgacagatgttaatgatgaactgatgtgggaggtaagagacgttggagttaaagactcccacttttggggttggtgccattcatttacatcagagatcaaaggaggaggctgcagagagatggggaaggagggttcagtttaggacaggtggagtttaagaggagccgtcggctgggctcacgcctgtaatcccagcattttgggagaccaaggtgggtggatcacgaggtcaagagatcgagaccatcttggccaacatggtgaaaccctgtctctaaaattaatcaaaaattagctgggcgtggtggcgtgcacctgtagtcccagctattcgggaggctgaggcaggagaatcgcttgaaccgggaggcggagattgcagtgagccaagagcgccactgcactccagcctggcgacagtgagattctgtctcaaaaaaaaggagccgtcagggcagccgttcagaacgtgggctgcagttgagagctcttgtgcagaacgtgcaataggacttatcagctgtaagatgttactgaagccaagagggcgggtgacctgcctatgaaatgaatctgagtggtctcagctcggggcaactttgtccctcacaggacatttggagatgtctggagagatttttagttgttacaacttgagggtgagggtggagaatgctactggcatctagtaagcatatgctaacagtctaaatgcacaggacagccccacaacggaattagccagcccgaaatgtcagtagtgctgaagttgagaaatgctggtctagagaaaggatagacggatcctaggatgaggagtgaacagaaaactaggtaagacaaccaggaaggtggggggcatggaaatgaagggaaaagtgtgtttcccaagagtgtcgcatacttctgggaggtccaacaggattgaggctgagtatgcctactggatctagcactagggaagtcatgggtgaccctgctgaatagtgagggcagaagcaagttgcagggatggaggagtgggtagcaagagaaagggtgtaataataacagctaaggactgagcagttgctgccaggcactgtgctaaacattgtatgtacattattactttgaatcctcacattcttatgagatgcaaagatgaaggggctaaggaggctgaggagggttcatataaagcactttggagttagatcttcatttgaagctgtcagtcactagctgttgaccctgggtcagtcagctaacccctctatactgaggtttcctcatctggaaaatgggagacggacattaaaaagcacttactggcctttcaccaaataccagataatgttctaagcacttttacatgaatcaccttaattactctcctaacaacctaacaaagaggtatttttattcccattttgcaggtaaggaaattgaggcactgggatggaaaataatttccctaggttacttagctagctgtaaatggcagagctgggatttcaacccaggccattttaccttgaatgatgaacctacctactatgtgctagtcactgtgctgccactttatctggcacttatttcaattatcttttttttttctgagacacagtcttgctctgtcacccaggctggagtgcagtggcgcaatctctgctcactgcaacctccacttcccgcattcaagcaattcttgtgcctcagcctcccaagtagctgggattacaggcgtccaccaccatacctgactaatttttgtatttttagtagaggcagggtttcaccaccacgctggtctcgaactcctgacctcaggtgatctgcccaccttggcctcccaaagcgctgggattacaggcatgaaccactgcgcccggccaaattctcaaaaagcccaaggcccacccccaaccttattttacagacaaggaaaccaaggtccaaggtcacaagctaataaatgtcagagctggaattgaagtccacttctgtctgaccagagtctacactctacctcattactgacttccccttccccttagattgatcactgcgcttccttaagtgcttctacatctgccatctttctgttctcccaaaacatcctgtgaaagcaggcagaggaaggtcctgcacatatttttgacaagtcagtgcacctcagttttctatctgcacacatgcatctgcaggtttttacctgcttgctcctgactttcaggattgccatgaggaacaaatgagaactagatgtccaagcgctttgctaccataacgtgagaaatggtattagtagccccatttatcagatgatggaatggaggttcagtttttgaaacagcccgtctgcttatgggcatgccttacttaggtgtaagattctttgtaggggtcatctgtctgccttttcgtcttgctgtttctgtgttggctacgtataccagccagccttttgccttctgcgaggcctatggctcctagcaaccagctgctaccaccagcaaggaagggaaagagctgccaggagctttcccagttggtacataataaggaagcaatacagcatcctattaaaagcagatttttagaggggaagagatctaggtttgaattccactatgagctacagtatgttatcctccaacgtaaaatagagtaatactctccttagatattttcagctcatttaacccccacaaaaatagagggcttttctttttttaagttttatcttcattgtgttttctgatgataaaaataattcagttgccaattctaaaacaaaacaaaacaaaaaaaacttaatcatctgaagcaaattcagggttaagtttacatgagagaagaattgcatgtcggtggtttttgcagaacccacataattccccatcaagagaagatcatcattaacagtttgcaggggtgggtgggtctgtgagtatacatacgtctcaatacatattagaaaccccagttaagaaatggaggtacaggctgggcagggtggctcacacctataatcctagcactttgggaggccaaggcaggcagatcacttgaggtcaggaatttgagaccagcctggccaacatggtgaaaccctgtttctactgaagatacaaaaactagccaggagtggtgttggggacctgtaatcccagctactcgagaggctgaggtgggaggatcgcttgaacctgggaggtggaggttgcagtgagctgagatcatgccactgcactccagcctgggtgacagagcaagactgtctcaaaaaaaaaaaaaaaaacacacacacacacacacacagaaaattctggcagttcgctctctggtttaggtttcggtcagatgtcaacccttttaatccttagaacaaccctgtgaggtgctggtctacttcacccttggcaattcaaaacatgtcctgggccaggcatggtggctcctgcctataattccagcactttgggaggctgaggtaggaggatcgctggagcccaggagttgaagacaagcctgggtaacctagtgagactccatccctctctctctcttttttttttttaagtgcccagcatcacctgggagcttgttagaaatgcaaaatctcgggcatcaccccagggagacggagaccaaatccacattttcacaagatcctccaggttatttgtgtatacattacagtctgagaagcctgctatacacctgctgcacttgcttgtagagcagggaaggcactgaggccaagcttaggggtgtccacaacatgaccagggcagaatgagcttctccaacatgagctgtggcccccagcccgcccagcaaagttggtccctgcttcttctgctaccaccatacttcatgtctaaaagtgatcttctctcctccaggagctggtcgctgtcggctaagcaagattggagctactcgtcgtccacctccagctcgcgtaagggtggctgtgcgactgcggccatttgtggatggaacagcgggagcaagtgatcccccctgtgtgcggggcatggacagctgctctctagagattgctaactggaggaaccaccaggagactctcaaataccagtaaggttcaggccactcctcttccctcatgccatcacctccctctcctaggcctgcccacgttcccctgcctccccaggatccttgctccctccttagcaccgctttgttccctgagccttcactgttcacttaggaaatgttgacaggtgcccccatgatgggccctctctgggatactgtagggagagatgagaggttgaatcaaacatacattactgtgcacagagagggaggagcaatgagggtgagcaggtgagccccaagtagaggctgggggacatatcaggagggttggcggaacacagacctgccagccagcctacccaagctgcagctgggtagtgtcagagaagaccacccagatttggggacagaactcagaagggcagctactttataatcctactggggatttaaagttcaaactccttggcctgtttttctaggcgggggctggcaaaccatggcctgcaggtcaaatctgatcaggagtaagattttcagtaaataaaattttatcgtttatttacatattgtctatagctgctttctgactacagtggcagagttgagtagttgtaaaaggaacacatggcccacaaagcctaaaatatgtacaatctgcctttttacagaagtttgctagctcccatactaggccgttaacaatttgggcttcagtttctttccagcctcattccctcaatatatattaaactccctgctgtggcctaagctgcacttctccaccagaacgcagtggataggtgattggtatgtagagtctagttcagtcataagcagcatcctctattttccccattatggtgtaaaatacaatgttctacacatgtagccatttgaaaaagactgggaagccttgcttttttgctattcttgattctcagaatttctttctttggtcaaaatcttccttccttgagcagaatcagttactcctttgagagtgtgttcttatcttcgtttcctaaatcacagcaaagtgtggatatctatcctaccagactgaaaaactccaagagcagggatatcagatctatctctgtattcctaacaccaatagagagatgaggatggagtaggtgttaggtggatgctttttaaggtctttgtacaagaaaggggatagagacgttctcttaaatccaaggtccagatgagagtagaatcccttacccacccccaccccactccaccccttacacacacacacacacacacacacacacacacacgctaatttctttctttcttcctgcaggtttgatgccttctatggggagaggagtactcagcaggacatctatgcaggttcagtgcagcccatcctaaggcacttgctggaagggcagaatgccagtgtgcttgcctatggacccacaggagctggtgagggagccagaaaagaaacagctatgggtcagaaagggctggggaaacggagaggaaaacctcacagttttctccactctcttcccagggaagacgcacacaatgctgggcagcccagagcaacctggggtgatcccgcgggctctcatggacctcctgcagctcacaagggaggagggtgccgagggccggccatgggccctttctgtcaccatgtcttacctagagatctaccaggagaaggtgaggccccgtgctggttgggagaggagcaacaaagggtcaaagtaagacctggttctagaacatgaagctctgctgtagcagggaggtaaggtgagacctagaaagacagagactggggtagcagatggtacaactccgagaatagaacagagaaaggaaactgatccccaggaagaaacagcctctctatggagaattgcccttccccttcactgcttacacaggtattagacctcctggaccctgcttcgggagacctggtaatccgagaagactgccgggggaatatcctgattccgggtctctcccagaagcccatcagtagctttgctgattttgagcggcacttcctgccagccagtcgaaatcggactgtaggagccacccggctcaaccagcgctcctcccgcagtcatgctgtgctcctggtcaaggtgaggccgcagacaggggcgaggacctgggaagcccaggagcctgagctaagcacgagacctttgttcttacccccaggtggaccagcgggaacgtttggccccatttcgccagcgagagggaaaactctacctgattgacttggctgggtcagaggacaaccggcgcacaggcaacaagggccttcggctaaaagagagtggagccatcaacacctccctgtttgtcctgggcaaagtggtagatgcgctgaatcagggcctccctcgtgtaccttatcgggacagcaagctcactcgcctattgcaggtcaggcccacctgtctcagggaagaaggggctgcagaaggaggttctcaggcctgctgtggggtggggaatagcagttgaggcataggaaggctgggcttctgacccacccactgcctggtctcaccctcaggactctctgggtggctcagcccacagtatccttattgccaacattgcccctgagagacgcttctacctagacacagtctccgcactcaactttgctgccaggtccaaggaggtgatcaatcggccttttaccaatgagagcctgcagcctcatggtgagaactgggggaggcaggagtggaaacgctgggtctggaaattagggagtttgttgaaaccaccaagcatcagcacagaggctgaccacccccaatccctctctccaccccatcctccaatcatctagccttgggacctgttaagctgtctcagaaagaattgcttggtccaccagaggcaaagagagcccgaggccctgaggaagaggagatcgggagccctgagcccatggcagctccagcctctgcctcccagaaactcaggtgagcagtggggccttgggtgtatccccttcctgatgtatggcttagcagcagagctgcaatgcccgtcagatccttgagcagagagctgtgatcttgttcctctcccattaaattcaccctaggccggatgcggtggctcactcctgtaaccccagcactttgggagactgaggttgggtggatcacctgaggtcaggagttcgagaccagcctggccaacatggtgaaacctcatctctactaaaaaatacaaaaagtagccggatgtggtggcatgtgcctgtaatcccagctacttgggaggctgaggcaggagaatcccttgaacccaggaagcagaggttgcagtgagctgagattgtggccattgcactccagcctgggcgacacagcaagactccgtctcaaagtaaataagtgaattcaaccctggctaggcacggtggctcacgcctgtaatcccagcactttgggaggccaagacgggtggatcacctgaggtcaggagttcaagaccagcctggccaacatggtgaaaccccatctctactaaaaatacaaaaattagccaggcatggtagtgggcacctgtaatcccagctactcaggaggctgaggcaggaagaattgcttgaatctgggaggtgaaagttgcagtgagccaagatcatgccactgcactccagcctaggtgacagagcaagactgcatctcaataaataaataagtaaataaataaattccccccaaattctactccattgaatcactaaagtctaagattaatctctcctcagtgctgctgccttggggacctaaggaggcctcctcctggggatcctttccattttccaacccctttagccttcagcaaaacttctcactttgggacagctgtttcaaggatgagcatttttgcttctggttcaaggagtgatctggatcagatctttcagatccatgagagcaaagcaaaggagacttggaagagctgtcctgctgagaccatctggtctgtgtgtcagtgcccagcttctccatgactctccggggagccagctgctgtcctaactgcgtctaccctcaatccagataaagcctctaaactaagtcctttgtgtcacctcctgccccaactccaatcaccccacctcatggcccagtatgtactaatcctcaggtcatctctgttcaggggtcttgctttctgtgtctggccacttagcccttgcgctattccctccaccccccaggagccagttgcagttttaactttgccctgtttctacccctagcccaaataaagcctgtgaactactaaacagaggtgacctgaggtggccaagggttagtgcccactctgtcccagggggctactgtagttaaggaagatgccacacacaagaagatgcttgtgcactcatgaccccatctctcagtcttgtctttcccaaaccatctgtcagcactccccactgctgtgtgcacccagaaatgtgcacaggtaagctgtcagacaggcactctgagtaaggggaagctcagagttgggcacatcaaacccagcagacccagagcttgggggcctcacaggagagcaagtcagatgggaacatcagtatatgataccaggtggagaattcagaatcaggaaggagtagctgctgctgctgtgagagtcaggaaggaagagatgacttctagtgtttgcccacgtatgttctgatcctgtttttccaaggcactagcatggaaagcacaggagtgtccctgtcctccaggagccagttcacagcataggaagggagatgcattgttaagcttggcgtcatgggaaaggtggcatcaaactgacctggaaagattattgatacagatgtgaggaggtgtggggcaagattccaggcaaaataaatgaatgttagacgttgctgactgggcgcagtggctcacacctgtaatcccagcactttgggaggccaaggtgggtggatcacttgagcccaggagttcaagaccagcctgggcaacatagtaagaccccatctctacaaaaaataaaaaaattagctgggcatggtggcatgcacctgtggacccagctactcaggaggctgagacagggggattgcttaagcctcaggaggccaaggctatagtgagctgtgatctcaacactgcactccagcctgggtgacagagcaagaccctgtctcaaaaaaaaaaaaaaaaaaaaaaaaagaatgttaagccttaccgtgctcagagtcagtcaggactgcttgaacaggccttcccagctgcccacagcagggaagcttggcagctgaggtcttcggtggatttcaaagccctgctaaagatggcatcctctgtgatgttttccgcaactgctcctccaaatggataggcactgtcctggctgtcaccttattatggtctcttgatttcctcagtagacagtgcctccagggcagggcagtgtcttaggtctctcatacctggcactcaagtgttcgcctgatttcctggcatccccgagcagtcacttcacctgatgaagacactgcacccagagaaactggatgcctagcaagttaacattaggttctggagctacaggatataccaagttaaggtgtggtgaggggagtcctgctgctgtaggtggtgatgagggaggaggtaggtggggagcaacttctttttctgctcagccccctacagaagctaagcagcatggacccggccatgctggagcgcctcctcagcttggaccgtctgcttgcctcccaggggagccagggggcccctctgttgagtaccccaaagcgagagcggatggtgctaatgaagacagtggaagagaaggacctagagattgaggtacgtgttttagggatgtgggagctggattcctattggccttgagaagcaatccttggatcttcagacagggaaggacactcaggctggactagagtccagttttctcccaataccggaagttctccagcttctgcttgaatgtccttaacatggctgaactttgacagacaattgagaccagatgtgagggtgagaagaaaaagttcaaagtaaaagcaacaaatgttaaacattacatttcctaaagcccagctcaattaattgaggactgtgcttgaaaagcctttcccttcaatatttgcagaggcttgttccacctctgggtagccccctaatcacagaaagcccttaattatgttaggctccacctgtctcctggtaacctcccactggtcctagccctgccctctgggggctcagagccttgcatactcaccctggtaacccactcccttcaggctgccctggagttgggtctggatcacatctccctgatcctttccaacagaggcttaagacgaagcaaaaagaactggaggccaagatgttggcccagaaggctgaggaaaaggagaaccattgtcccacaatgctccggcccctttcacatcgcacagtcacaggggcaaagcccctgaaaaaggctgtggtgatgcccctacagctaagtaagtttgactccaggggctggggggccaaggcagctgagatcctataagggaggaagtgttaggagcagctgtctccatgtcattcatattctcccaccacataccagtcccagggaggggtgaggaggctctgaggcagtgctgggggtgctctgccctcgggtgtttaggacagtgggatggacaaacgagtagaggattgaagataatgcaagactgactgaaattcctttaaatgcgggtataaaaaaggtcatgtggaaacacaacaggttaactctggatggaggggagctggggaatcagaaatggaagaatcgaagggctaccagggagggtgaaaagtaccctttgccctgactccaattctcgattcctactttcagttcaggagcaggcagcatccccaaatgccgagatccacatcctgaagaataaaggccggaagagaaaggtgaaagtagctgggggcttaggctacacctggagcccagaagtaagggggagtaggctctagggggaggagcgttggccttggggttaaacgaactggatgatggccgccagctactaacagacctcaacttgcttacccctggaatgtggtgatggatggttccttgcagggcatttagggtggaaggcagtgatgtggatgtacctcgcagagcggatgttccactgtgtagcctggcttctaccctctacaagcttaagagggaaaacttagggaactatgacctaagcagtcaagcaagaaaccacacatatgcacatacccagaatcgaacaccactagaactacccaaaaactgagatggttgggggaggtatcatttattcatattactttctcccatgtactttttgaaagacagcttattctttcccttttagagatgagggaccagatttaagagcttattttgtgctttacattcattaactcacttgatctccacagcaactccatgagaagggtgctaatattaccactgggtactgagtagtacctctctttcactagttgcataataagaattaacccagagagtgacctgagggcgggattttggacacacttgacaagagaggaagaggctggagcgcaggaggtagctggtgctgggctcctagtcttggcagaggagcccaaagcacttggctgccctgcgtgtcactcatctccctttgcctcccagctggagtccctggatgccctagagcctgaggagaaggctgaggactgctgggagctacagatcagcccggagctactggctcatgggcgccaaaaaatactggatctgctgaacgaaggctcagcccgagatctccgcagtcttcagcgcattggcccgaagaaggcccagctaatcgtgggctggcgggagctccacggccccttcagccaggtagcagcccactggactgggggagggcgggggcgggggagaccgggtacccccgagaccctgtcccctatcgatcctgtcccgccaggtggaggacctggaacgcgtggagggcataacggggaaacagatggagtccttcctgaaggtgaagtcacggccctgcccctcctctgcctgtcctgcgccccgcgcccctctctaacgtcgctgtctccctccctcctgtgttgcaggcaaacatcctgggtctcgccgccggccagcgctgtggcgcctcctgaccgtcgtctcctcactccgccttttcaaatttttgtataaccccgtgttgtgtaaatacagtttttgctccggtg

SEQ ID NO: 62 - DNA, 3794 bp, Homo sapiens
gtaacgcgtggctcccttgggctggcgggaggggccggaggctcgcgaggggcgggggcggcgacggcggcggagcgtaggggaggggaccggagaggaggggatgagcacacgggagaggagaagagggagacccgccgcctccctccctccctagctgacttgctccctcccgggctgcggctgctgcaaaagccagcagcggcagcgggagctgtccggaggccggcgtcgaggtgagacccgggcagactgaggctgcgggtaggagtggaccgaccgacggctgacgccgggcggactgcacgggaatgcgggtgtctggagggctggtggtggtgctgggcgggctgaaccatcgggaggaggcgccagcccaccgaaggcgagggaagccccgggagaggggctgacaggggatcgaaggagataaccaggtcccccagaaaggggcgggagcgtcctcgccctaaacgcgcagcaagaaaacccgcaccgcctgggagcccagggaggaggggaggatgcagagggagtggaatgcgaatgtcgggtcctctgcccagtcggcctgtcggagtgctatttgcacagctcgttgattttggggtgctgggatctgagagtctggatcttgttggatggacccagggagagaccctggagaaggtcctgtttacaaaagggttaatcttccccagggctctccaagcagaagactttgagtagagcactcctcccgcagggatgtcccaccctaaggcaaaggaaaccccaacttttcttcctctccctagaggcagtgcaaggctggccctgagacaggaatgtggcccaattgggcctgcagtgctgagcgccctcttccctcctcaccccaagcctatctcctcctcttccagggtttgccgctgtctctgctattccatcctccccataggggctctctcccctctcccatctcaagatggcagccagcagctctgagatctctgagatgaagggggttgaggagagtcccaaggttccaggcgaagggcctggccattctgaagctgaaactggccctccccaggtcctagcaggggtaccagaccagccagaggccccgcagccaggtccaaacaccactgcggcccctgtggactcagggcccaaggctgggctggctccagaaaccacagagaccccggctggggcctcagaaacagcccaggccacagacctcagcttaagcccaggaggggaatcaaaggccaactgcagccccgaagacccatgccaagaaacagtgtccaaaccagaagtgagcaaagaggccactgcagaccaggggtccaggctggagtctgcagccccacctgaaccagccccagagcctgctccccaaccagacccccggccagattcccagcctacccccaagccagcccttcaaccagagctccctacccaggaggaccccacccctgagattctgtctgagagtgtaggggaaaagcaagagaatggggcagtggtgcccctgcaggctggtgatggggaagagggcccagcccctgagcctcactcaccaccctcaaaaaaatcccccccagccaatggggcccccccccgagtgctgcagcagctggttgaggaggatcgaatgagaagggcacacagtgggcatccaggatctccccgaggtagcctgagccgccaccccagctcccagttggcaggtcctggggtggaggggggtgaaggcacccagaaacctcgggactacatcatccttgccatcctgtcctgcttctgccccatgtggcctgtcaacatcgtggccttcgcttatgctgtcatggtgagccccatgggaccctagcccaggcctgctgtggctcccagcttcccgccagcgctgcaatagagcctctggagtaatcatgccttccttcccctctcctctctgcatggatcccacctccccaattccagggcctttgtttgcctctccctaggacctaaccctctgagccaccactgccctgcccctttgggtgggagggatatggaaacacgtgtcacacagcctcgctgacctgtgccctcctccccctgccccttcactcctccttcctcccttacccgccatctatggggctggcctctctctcttctggatgacttttccacctgatcccttctgggctggcttctcctgaccccggctatgtgcctccacccctcgccctaaccccagtcccggaacagcctgcagcagggggacgtggacggggcccagcgtctgggccgggtagccaagctcttaagcatcgtggcgctggtggggggagtcctcatcatcatcgcctcctgcgtcatcaacttaggcggtgagtgggggcttgggacaggcaggggaggaatggaagggttggcaagggcagctttactaacccctgcccctgctctctcctgtctgtcctccttacctctcctttgtctctccttgtctccccctccccccgtctgtccttccctctcctctcccacagtgtataagtgaggggctctgccccgcatcccaagacttttcttcctgttgggagctgccttgggcccatccctcccctggggggagcccaactgatggccctggcccccacccctaaggaccaagggagcctgagcggccttgtttacagcttctgtcctgctcctgcatcttgccaggctcctctgccaactgtaggcctgcctcatccctgcactggttccaacctccctgcactaatgcctgcatcccctccggcctcttggccccctatccctgcacttctggaaacctccctgcactctggaaacctccctgaacacctccccaactctgcgctctcagcctccctgcatctctcctggcctccctgcacttcttccagccccccaaattctctggacctccaccctggccgcctcctcccaactttcattgtcttggcatctctcaaccctcagtcctctcttccttcccttctttatcatctcccctttcctctccacgtcccgcccccttcctcttcctgcctcctcatctcccttaagcatcctcttctccaacctcccgtcaccgtttactctgcaaaattgacagcacttagacgaggcttgggggcagggagcagtgttgggagagggctccccaaccccaggctcggactgttctctgctgggaccacccagggtcggacacccaagggtgcctggcaggtcgcagagttggcaagccgggcctcgtatggggactcgggtgagggtggcgagtactggttccgaacgcacgcaggggagaagggagggacgcggcgctgacccttccaggtcagctggagttgacccgcccacctgggcttttcaaccccagtccgcgagtttctttcttgaaggtgtgggggctagattcattcacgtgcttcgtaatgaaataatccaaaaaataggaccaaagcgcccactggcaggagcgagggcggggcgccgcgctctataattattttctaagatgatgggggaggtttgttgcacgcgacagcccgctgaggaggcggggaccgagctacaacgcggttcggatttggcgggggtttttttccttaaaaaaaaaaaaaaaaaaaaaaaaaaagtctgggggaagaaaaaaactaaaattcttaaaaaaaaaaaaaaaaggctattatcaaactgatttctccctttttgtatgccggatgctgcatgagtctgaaacaccaataaacggagactgcatgaga

SEQ ID NO: 63 - DNA, 6289 bp, Homo sapiens
ggcgccgtgtccgggtgtggagaggggcgtcgtggaagcgagaagagtggcccgtccctctcctccccctttccctctttcggaaagtggtttctgcggggcccgggagcctcggagtaccgaacctcgatctccggggcggggtccttggtggggactgagcgccccctcccggggacgggcggtctggccgcggagtcccctgcgggagcgtgattggctggaaacggtcccgaacccccaggggagcccgatccctgggggaccctggcttcggactccagtatctgtcgtcgcagggtccctgccctagtggcctatgtcccttgctcggggccatggagacactgcggccagtacggcggcgcctctgtctgaagaaggggaagtgacctccggcctccaggctctggccgtggaggataccggaggcccctctgcctcggccggtaaggccgaggacgagggggaaggaggccgagaggagaccgagcgtgaggggtccgggggcgaggaggcgcagggagaagtccccagcgctgggggagaagagcctgccgaggaggactccgaggactggtgcgtgccctgcagcgacgaggaggtggagctgcctgcggatgggcagccctggatgcccccgccctccgaaatccagcggctctatgaactgctggctgcccacggtactctggagctgcaagccgagatcctgccccgccggcctcccacgccggaggcccagagcgaagaggagagatccgatgaggagccggaggccaaagaagaggaagaggaaaagtaaaggcacacccttacaccttgtcccggggctgctcccctgatggcgggaggaaatagggaggggaaaatgtgggacgctggaacctttgaaagtggagggagggaagccagcgggggaggaggaacgggcaggggagaagcacacgtgtgggtgggagggaggaccgccctcacccttaactatgttcacctgtcccagaccacacatgcccacggaatttgattttgatgatgagccagtgacaccaaaggactccctgattgaccggagacgcaccccaggtacaaacgaagaggaaacagttgggggaggtgaagggcctcggctcagttacccaagatcggctcccctagaggcctttgcttgctgcctcagctcccacacaacttacagctgcaggagagagtattcacccagtagcaccatctttatgacttagattactaccttgtcttccttttttttttttttttttttttgagatggagtcttgcccttgtcccccaggctggagtgcaatggcacgatctcaactcactgcaacctccgcctcctgggttcaagcaattctcctgcctcagcctcccaagtagctgggattacagacgcatgccaccactctgggccaatttttgtatttttagtagagacaggctttcaccatgttggccaggctggtcttgaattcctgaccttgtgatccgcccacctcagcctcccaaagtgctaggattgcaggcatgagccaatgcgcctggccccttgtcttcctttaagagacaattataatacaaaaaattagccgggcatagtggcgggcacctgtagtcccagctactcaggaggctgaggcaggagaatcgcttgagcctgggaggtggaggttgcagtgacctgagatcacaccactgcactccagcctgggcgagagagtgagactccgtctcaaaaaacacaattacagataattctttttttaaaaaaacaactagtcattgattctggaaaattacagataattctatcatgtttcccattcccagaagtccaagtcctggcctttcaatattatctagatctgcatccctctactaccatgtacattctttaatcacaccgctggccccatttcccaccccacatgccttcctagaatttaccctcagagtcatgcctttccttttttcttttttttgaggggtggagagacagagtcttgctgtgttgcccagactggttggtctcgaactcttgagctcaagtgatccatccgcctcggttctcaaagtgctgagattacaggcatgagtcactgcacccagcctagagccattcttgatttctctctcttttacctgaacattcacaccagcagcaagtcttggtagctataagatgtacatttccaagtacctctgctagtctccactttcaataccacatccccatccaagccactgtctttcttgcctggatagttgtagtagctcctaactgggctctctgcttccagcttctgcaattcagatgaaccttttaaaacataaatcatatcactttttttttctttgagacgaagtctttctcttgctcaggctggagtgcagtggcatgatcttggctcactgcaatctccacctcctgggttgaagcgattctcctacctcagtctcctgagtagctgggattacaaggacacgtcaccacgcctagctaatttttgtattttctagtagagagggggtttcgccatgttggcgaggctggtcttgaactcctgacctaaagcttcccaaagtgcctgcctcagcttcccaaagtgctggaattacaggcgtgagctgctgcactcagccataaatcgtgtcacttttccacttaaaattttccaagggattccatcttgccagggaagagcatgtcaaaggagaatccaagcgcttttcccgccacctccagttctctgcactcttttttttgtttttgtttttggcgagtaggggagacggagtgtagctgtgtcaccgaggctggagtgcagtagtgcgatcttggctcattgcaacctccacctcccgggttcaagcgattcttctgcctcagcctcccaagtagctgggattacaggcgcccaccaccacgcccagctaattttttgtgttggccaggctggtctcaaactcctgacctcgtgagttgcccacctcagcctcccaaagtgctggcattacaagcgtgaaccaccatgcccggcctgcactcttctttgaacagaactctgttcttgtcctggggcctctacccttgccattcccctgcccagtatgttcctccctgttcttcacattacctgtgccttcctgtcaatcaagatctttgcttctcaccctctctgaggtccaaccctgaacctcaggtcctccaagacagaggcctggggacctgcatgtttaaccagctccccaagtgatgagtgaggtccaggcaggtatggtgtacaccacctccatcccttccatgtatcttaccttcctcttctccaggaagctcagcccggagccagaaacgggaggcccgcctggacaaggtgctgtcggacatgaagagacacaagaagctggaggagcagatccttcgtaccgggagggacctcttcagcctggactcggaggaccccagccccgccagccccccactccgatcctccgggagtagtctcttccctcggcagcggaaatactgattcccactgctcctgcctctagggtgcagtgtccgtacctgctggagcctgggccctccttccccagcccagacattgagaaacttgggaagaagagagaaacctcaagctcccaaacagcacgttgcgggaaagaggaagagagagtgtgagtgtgtgtgtgtgttttttctattgaacacctgtagagtgtgtgtgtgtgttttctattgaacacctatagagagagtgtgtgtgttttctattgaacatctatatagagagagtgtgtgagtgtgtgttttctattgaacacctattcagagacctggactgaattttctgagtctgaaataaaagatgcagagctatcatctcttaaaaggaggggctgtagctgtagctcaacagttaggccccacttgaagggagaggcagaattgtactcacccagattggaaaatgaaagccagatgggtagaggtgccctcagttagcacctgtcccatctcgggccctccaactcctcccagtcccactccagtgcagccagctggctccaaggtagaaacccatgagcactcagggagcagtgtgccttcagctgcagcagaagcagcccggaggataaaatgagaaccagctgcacacgggccctttaactcccaagccccacccctgggcttggcctgccttgccctgccgggaagtgatccccaaggcagggtgagagttccccatctgaggcgtttgttgcagctacctgcacttctagatgtgagtacattgtactagccccccaaaccccaaatcaggggcagatctttgtatcccttgaggctctctttagtcctgtcttgctttgaagggccttgcttctgctggggcagggaaaacatgtctgaatcagagtggggaaggaggatgggtggtggctttgcttttggaggtttcactttccaatagttgggagtcttctgggttttgaagtaaaggcagattaacaccaacaccggtcccccacccccctgcaactctcaggcctctctctgacttcagggtcccacctgggaaatcaggtggggaaccttacagggtcattcagaccccatcttagccctagatcggtgcttgctctactcacctgcactgtcctggggacctgggctctggcctgtcaccttgagctccaagaatgtgacctgtacccattcaggccccttaactctgacagatgagggtttcttactcctccatgcagggctgggccagctgttggtctcagtcgatcattcaggaagtcattagcagagtgatttccagaaggcgtagaatttagtgaccaaggttctttcctttttgggaggagaaagtgaaaactaggatgctcagctggacccaccagcctgagattctggggattttagagctgtcccttggggagccaagcacttgggggtggaggtgatagcgaggctgatggcccctgtgttctcagctctctgcctgggtagcccctgggtgatgggggagaggccagctgtcacgtggggtatcaggtggctctgccagaaactcccttggcacacagagcactgggtcggccctcgggtgtggctgtttgggcaggacagccctctgtatgtagccttgagcaggtaggggggccaccttgagtgggtggcccagagacagcctcagggctccaaggtaacggggtgctcaggttatcttgggtgctgccctcccaggttctgggggagcagaggctgggcgctggcccaacttacaggaaacactcacctttgaactgccattagcaccatctgggcagtacacagccccacccaggtcctctagttcttgttctcggcttagaatctttgtgtttctgcctgagaagccactgcctcctagtttgtggtctctacagttatagccaggttggacttccggctccgtcctttgataactgtgtgctcttgggcaaatttcttaacttgcaggttcttgtgaggataacatgagttaattgagggcacttaacactacctggcacagattaagctcatctgaagtgggagctgttacttaggggcgtttgcctagaacacagggtccagaggctctctcccggaaacttagacccagtgagtcagaagtgaggcctgcaaaaagcagcaggagtggggttaagaattccagcctagggctggatgcggtggctcaggcctgtaatcccagtactttgggaggcccgaatgggaggatggcttgaggccaggagttccagaccagcctgagcaacatagcgagaccctgtctctgtttgtgtgtgtgtggttggggttttgttttttttttttttttaaagaattatagctcagtcctatgattaggcaagttgagaaaatattgatgaagatcaggggtgctgaagcctggttcctggggtcgcttctgatctaggcggttcttgcctctggtgactggtgttaattggcaggagtgggaggagggaggacaagtggaagtctaggctggctgagctgttctgtctcgaaaagttcctaaaactgtgctgctttaaaaaaaaaaaaagtaatttatgagacacattctcaatttccattaatcatctcctaaagggggtaaaccaggaagccgctgggtgaaaacaggctgttggcaattcctgagtcatgtgacccattctctaaagactagaatatttaacttaaatcagtgagaaactctgtgaa

SEQ ID NO: 64 - DNA, 35252 bp, Homo sapiens
aaagggttaatcttccccagggctctccaagcagaagactttgagtagagcactcctcccgcagggatgtcccaccctaaggcaaaggaaaccccaacttttcttcctctccctagaggcagtgcaaggctggccctgagacaggaatgtggcccaattgggcctgcagtgctgagcgccctcttccctcctcaccccaagcctatctcctcctcttccagggtttgccgctgtctctgctattccatcctccccataggggctctctcccctctcccatctcaagatggcagccagcagctctgagatctctgagatgaagggggttgaggagagtcccaaggttccaggcgaagggcctggccattctgaagctgaaactggccctccccaggtcctagcaggggtaccagaccagccagaggccccgcagccaggtccaaacaccactgcggcccctgtggactcagggcccaaggctgggctggctccagaaaccacagagaccccggctggggcctcagaaacagcccaggccacagacctcagcttaagcccaggaggggaatcaaaggccaactgcagccccgaagacccatgccaagaaacagtgtccaaaccagaagtgagcaaagaggccactgcagaccaggggtccaggctggagtctgcagccccacctgaaccagccccagagcctgctccccaaccagacccccggccagattcccagcctacccccaagccagcccttcaaccagagctccctacccaggaggaccccacccctgagattctgtctgagagtgtaggggaaaagcaagagaatggggcagtggtgcccctgcaggctggtgatggggaagagggcccagcccctgagcctcactcaccaccctcaaaaaaatcccccccagccaatggggcccccccccgagtgctgcagcagctggttgaggaggatcgaatgagaagggcacacagtgggcatccaggatctccccgaggtagcctgagccgccaccccagctcccagttggcaggtcctggggtggaggggggtgaaggcacccagaaacctcgggactacatcatccttgccatcctgtcctgcttctgccccatgtggcctgtcaacatcgtggccttcgcttatgctgtcatggtgagccccatgggaccctagcccaggcctgctgtggctcccagcttcccgccagcgctgcaatagagcctctggagtaatcatgccttccttcccctctcctctctgcatggatcccacctccccaattccagggcctttgtttgcctctccctaggacctaaccctctgagccaccactgccctgcccctttgggtgggagggatatggaaacacgtgtcacacagcctcgctgacctgtgccctcctccccctgccccttcactcctccttcctcccttacccgccatctatggggctggcctctctctcttctggatgacttttccacctgatcccttctgggctggcttctcctgaccccggctatgtgcctccacccctcgccctaaccccagtcccggaacagcctgcagcagggggacgtggacggggcccagcgtctgggccgggtagccaagctcttaagcatcgtggcgctggtggggggagtcctcatcatcatcgcctcctgcgtcatcaacttaggcggtgagtgggggcttgggacaggcaggggaggaatggaagggttggcaagggcagctttactaacccctgcccctgctctctcctgtctgtcctccttacctctcctttgtctctccttgtctccccctccccccgtctgtccttccctctcctctcccacagtgtataagtgaggggctctgccccgcatcccaagacttttcttcctgttgggagctgccttgggcccatccctcccctggggggagcccaactgatggccctggcccccacccctaaggaccaagggagcctgagcggccttgtttacagcttctgtcctgctcctgcatcttgccaggctcctctgccaactgtaggcctgcctcatccctgcactggttccaacctccctgcactaatgcctgcatcccctccggcctcttggccccctatccctgcacttctggaaacctccctgcactctggaaacctccctgaacacctccccaactctgcgctctcagcctccctgcatctctcctggcctccctgcacttcttccagccccccaaattctctggacctccaccctggccgcctcctcccaactttcattgtcttggcatctctcaaccctcagtcctctcttccttcccttctttatcatctcccctttcctctccacgtcccgcccccttcctcttcctgcctcctcatctcccttaagcatcctcttctccaacctcccgtcaccgtttactctgcaaaattgacagcacttagacgaggcttgggggcagggagcagtgttgggagagggctccccaaccccaggctcggactgttctctgctgggaccacccagggtcggacacccaagggtgcctggcaggtcgcagagttggcaagccgggcctcgtatggggactcgggtgagggtggcgagtactggttccgaacgcacgcaggggagaagggagggacgcggcgctgacccttccaggtcagctggagttgacccgcccacctgggcttttcaaccccagtccgcgagtttctttcttgaaggtgtgggggctagattcattcacgtgcttcgtaatgaaataatccaaaaaataggaccaaagcgcccactggcaggagcgagggcggggcgccgcgctctataattattttctaagatgatgggggaggtttgttgcacgcgacagcccgctgaggaggcggggaccgagctacaacgcggttcggatttggcgggggtttttttccttaaaaaaaaaaaaaaaaaaaaaaaaaaagtctgggggaagaaaaaaactaaaattcttaaaaaaaaaaaaaaaaggctattatcaaactgatttctccctttttgtatgccggatgctgcatgagtctgaaacaccaataaacggagactgcatgagactcgcctccaatctcggttggttcctgcgttcgtcccgccggcccggcggtgctgcctttctggcagaaccttactgggtggtatacgcatgcgacttcccggtggccatctttactgtgggctgaagcctgtgcgcttactcgcgcatgtgcaagccttccctcgctttcctcttccaagtagccttgcctagagcggagcctcccgcgccatttctgtgcgcctgcgtagcgtgaccctgcgcagcctgggaggcgggtcttagctccaggtgcgtacggcatctgacttgacgtggcccacaactgaaaggtctggggagaaggcgccgtgtccgggtgtggagaggggcgtcgtggaagcgagaagagtggcccgtccctctcctccccctttccctctttcggaaagtggtttctgcggggcccgggagcctcggagtaccgaacctcgatctccggggcggggtccttggtggggactgagcgccccctcccggggacgggcggtctggccgcggagtcccctgcgggagcgtgattggctggaaacggtcccgaacccccaggggagcccgatccctgggggaccctggcttcggactccagtatctgtcgtcgcagggtccctgccctagtggcctatgtcccttgctcggggccatggagacactgcggccagtacggcggcgcctctgtctgaagaaggggaagtgacctccggcctccaggctctggccgtggaggataccggaggcccctctgcctcggccggtaaggccgaggacgagggggaaggaggccgagaggagaccgagcgtgaggggtccgggggcgaggaggcgcagggagaagtccccagcgctgggggagaagagcctgccgaggaggactccgaggactggtgcgtgccctgcagcgacgaggaggtggagctgcctgcggatgggcagccctggatgcccccgccctccgaaatccagcggctctatgaactgctggctgcccacggtactctggagctgcaagccgagatcctgccccgccggcctcccacgccggaggcccagagcgaagaggagagatccgatgaggagccggaggccaaagaagaggaagaggaaaagtaaaggcacacccttacaccttgtcccggggctgctcccctgatggcgggaggaaatagggaggggaaaatgtgggacgctggaacctttgaaagtggagggagggaagccagcgggggaggaggaacgggcaggggagaagcacacgtgtgggtgggagggaggaccgccctcacccttaactatgttcacctgtcccagaccacacatgcccacggaatttgattttgatgatgagccagtgacaccaaaggactccctgattgaccggagacgcaccccaggtacaaacgaagaggaaacagttgggggaggtgaagggcctcggctcagttacccaagatcggctcccctagaggcctttgcttgctgcctcagctcccacacaacttacagctgcaggagagagtattcacccagtagcaccatctttatgacttagattactaccttgtcttccttttttttttttttttttttttgagatggagtcttgcccttgtcccccaggctggagtgcaatggcacgatctcaactcactgcaacctccgcctcctgggttcaagcaattctcctgcctcagcctcccaagtagctgggattacagacgcatgccaccactctgggccaatttttgtatttttagtagagacaggctttcaccatgttggccaggctggtcttgaattcctgaccttgtgatccgcccacctcagcctcccaaagtgctaggattgcaggcatgagccaatgcgcctggccccttgtcttcctttaagagacaattataatacaaaaaattagccgggcatagtggcgggcacctgtagtcccagctactcaggaggctgaggcaggagaatcgcttgagcctgggaggtggaggttgcagtgacctgagatcacaccactgcactccagcctgggcgagagagtgagactccgtctcaaaaaacacaattacagataattctttttttaaaaaaacaactagtcattgattctggaaaattacagataattctatcatgtttcccattcccagaagtccaagtcctggcctttcaatattatctagatctgcatccctctactaccatgtacattctttaatcacaccgctggccccatttcccaccccacatgccttcctagaatttaccctcagagtcatgcctttccttttttcttttttttgaggggtggagagacagagtcttgctgtgttgcccagactggttggtctcgaactcttgagctcaagtgatccatccgcctcggttctcaaagtgctgagattacaggcatgagtcactgcacccagcctagagccattcttgatttctctctcttttacctgaacattcacaccagcagcaagtcttggtagctataagatgtacatttccaagtacctctgctagtctccactttcaataccacatccccatccaagccactgtctttcttgcctggatagttgtagtagctcctaactgggctctctgcttccagcttctgcaattcagatgaaccttttaaaacataaatcatatcactttttttttctttgagacgaagtctttctcttgctcaggctggagtgcagtggcatgatcttggctcactgcaatctccacctcctgggttgaagcgattctcctacctcagtctcctgagtagctgggattacaaggacacgtcaccacgcctagctaatttttgtattttctagtagagagggggtttcgccatgttggcgaggctggtcttgaactcctgacctaaagcttcccaaagtgcctgcctcagcttcccaaagtgctggaattacaggcgtgagctgctgcactcagccataaatcgtgtcacttttccacttaaaattttccaagggattccatcttgccagggaagagcatgtcaaaggagaatccaagcgcttttcccgccacctccagttctctgcactcttttttttgtttttgtttttggcgagtaggggagacggagtgtagctgtgtcaccgaggctggagtgcagtagtgcgatcttggctcattgcaacctccacctcccgggttcaagcgattcttctgcctcagcctcccaagtagctgggattacaggcgcccaccaccacgcccagctaattttttgtgttggccaggctggtctcaaactcctgacctcgtgagttgcccacctcagcctcccaaagtgctggcattacaagcgtgaaccaccatgcccggcctgcactcttctttgaacagaactctgttcttgtcctggggcctctacccttgccattcccctgcccagtatgttcctccctgttcttcacattacctgtgccttcctgtcaatcaagatctttgcttctcaccctctctgaggtccaaccctgaacctcaggtcctccaagacagaggcctggggacctgcatgtttaaccagctccccaagtgatgagtgaggtccaggcaggtatggtgtacaccacctccatcccttccatgtatcttaccttcctcttctccaggaagctcagcccggagccagaaacgggaggcccgcctggacaaggtgctgtcggacatgaagagacacaagaagctggaggagcagatccttcgtaccgggagggacctcttcagcctggactcggaggaccccagccccgccagccccccactccgatcctccgggagtagtctcttccctcggcagcggaaatactgattcccactgctcctgcctctagggtgcagtgtccgtacctgctggagcctgggccctccttccccagcccagacattgagaaacttgggaagaagagagaaacctcaagctcccaaacagcacgttgcgggaaagaggaagagagagtgtgagtgtgtgtgtgtgttttttctattgaacacctgtagagtgtgtgtgtgtgttttctattgaacacctatagagagagtgtgtgtgttttctattgaacatctatatagagagagtgtgtgagtgtgtgttttctattgaacacctattcagagacctggactgaattttctgagtctgaaataaaagatgcagagctatcatctcttaaaaggaggggctgtagctgtagctcaacagttaggccccacttgaagggagaggcagaattgtactcacccagattggaaaatgaaagccagatgggtagaggtgccctcagttagcacctgtcccatctcgggccctccaactcctcccagtcccactccagtgcagccagctggctccaaggtagaaacccatgagcactcagggagcagtgtgccttcagctgcagcagaagcagcccggaggataaaatgagaaccagctgcacacgggccctttaactcccaagccccacccctgggcttggcctgccttgccctgccgggaagtgatccccaaggcagggtgagagttccccatctgaggcgtttgttgcagctacctgcacttctagatgtgagtacattgtactagccccccaaaccccaaatcaggggcagatctttgtatcccttgaggctctctttagtcctgtcttgctttgaagggccttgcttctgctggggcagggaaaacatgtctgaatcagagtggggaaggaggatgggtggtggctttgcttttggaggtttcactttccaatagttgggagtcttctgggttttgaagtaaaggcagattaacaccaacaccggtcccccacccccctgcaactctcaggcctctctctgacttcagggtcccacctgggaaatcaggtggggaaccttacagggtcattcagaccccatcttagccctagatcggtgcttgctctactcacctgcactgtcctggggacctgggctctggcctgtcaccttgagctccaagaatgtgacctgtacccattcaggccccttaactctgacagatgagggtttcttactcctccatgcagggctgggccagctgttggtctcagtcgatcattcaggaagtcattagcagagtgatttccagaaggcgtagaatttagtgaccaaggttctttcctttttgggaggagaaagtgaaaactaggatgctcagctggacccaccagcctgagattctggggattttagagctgtcccttggggagccaagcacttgggggtggaggtgatagcgaggctgatggcccctgtgttctcagctctctgcctgggtagcccctgggtgatgggggagaggccagctgtcacgtggggtatcaggtggctctgccagaaactcccttggcacacagagcactgggtcggccctcgggtgtggctgtttgggcaggacagccctctgtatgtagccttgagcaggtaggggggccaccttgagtgggtggcccagagacagcctcagggctccaaggtaacggggtgctcaggttatcttgggtgctgccctcccaggttctgggggagcagaggctgggcgctggcccaacttacaggaaacactcacctttgaactgccattagcaccatctgggcagtacacagccccacccaggtcctctagttcttgttctcggcttagaatctttgtgtttctgcctgagaagccactgcctcctagtttgtggtctctacagttatagccaggttggacttccggctccgtcctttgataactgtgtgctcttgggcaaatttcttaacttgcaggttcttgtgaggataacatgagttaattgagggcacttaacactacctggcacagattaagctcatctgaagtgggagctgttacttaggggcgtttgcctagaacacagggtccagaggctctctcccggaaacttagacccagtgagtcagaagtgaggcctgcaaaaagcagcaggagtggggttaagaattccagcctagggctggatgcggtggctcaggcctgtaatcccagtactttgggaggcccgaatgggaggatggcttgaggccaggagttccagaccagcctgagcaacatagcgagaccctgtctctgtttgtgtgtgtgtggttggggttttgttttttttttttttttaaagaattatagctcagtcctatgattaggcaagttgagaaaatattgatgaagatcaggggtgctgaagcctggttcctggggtcgcttctgatctaggcggttcttgcctctggtgactggtgttaattggcaggagtgggaggagggaggacaagtggaagtctaggctggctgagctgttctgtctcgaaaagttcctaaaactgtgctgctttaaaaaaaaaaaaagtaatttatgagacacattctcaatttccattaatcatctcctaaagggggtaaaccaggaagccgctgggtgaaaacaggctgttggcaattcctgagtcatgtgacccattctctaaagactagaatatttaacttaaatcagtgagaaactctgtgaagttgtgtccttgtttataccaaacttcatgtgccttttcctgaacctgaagctgtgggaaggtctgggggcagggccgcatcaccgaccttacgtccaacctcaggactgcctggagcaagagccctggggttggggacaaaggaggctgcctggacctgggtaagggaaggggctggaggagaatgagtgcaattccctgcccttcacagcctgcaatcggagctgtgtttttgtttttgagacagagtctcgctctgtcccccaggccagagtacaatggcgcaatctcgactcactgcaacctctgcatccctggttcaagcaattctcctgcctcagcctcccgagtagctgagactacagttgcctgccaccatgtacggctaatttttgtatttttagtagagacgaagtttcaccatgttggccaggctggtctcgaactcctgagctcaggcaatccgcctgccttggcctcccaaagtgctgggattacagccactgcgcccggcctgaaactgatctttatcctcctcccagttcctactgtgcaccagagaccctccagtctctaatacctttgacttgaagagcagtcatttttttttccttttcttttcttttcttttttttttttttttttttgagatggcctcactcttgcccaggctagagcgcactcgtgtgctccatttacggctcactgcagccttgacctcccaggcacaggcgatcctcccacctcagcctccaaagtagcagggaccacaggtgtgcaccaccacacctagctaatattttttatggtttttatagagacagggtctccctatgttgcccaggctggtcttgaactcctggcctcaagtgatcctcccatcttggtctcccaaagtgctgggattacaggtgggagccaccaagcctagtcaacagtcacttttattctcacttcactggagaggaaggctcagaggctagtaagtggcccaggagcatgctggcagtgataaaacctgctggagtgacattttcccactggctctcaatcctggatatatattaagagtcagaggccaggcgcggtggctcacgcctgtaatcccagcactttgggaggccaaggcaggcggatcacgaggttaggagatcaagaccatcctggctaacacagtgaaaccccatctctactaaaaatacaaaaaaaattagctaggcgtggtggtgggtgcctgtaatcccagctgaggcaggagaatggcatgaacccgggaggcggagctgcagtgatccgagatcgtgccactgcactccagcctgggtgacagagcgagactcgtctcagaaaaaaaaaaaaaaaatgagggagaactttttacaatagcaacgggtgaacctcacccagaccaattaaatagaatcaccggagatgggtggctttaaaaaaaggtctccagaaggcctggcgcggcagatcacacctgttatcctagccctttgggaggccgaggtgggtggatcacttccagcctgaccaacatggcgaaaccctgtccactaaaaacaaaattatctgggtgtggtggcggacatctgtaatcccagctacttgggaggctgaagcaggagaattgcttgaactcgggaggcagaggttgcagtgagccgagatggctacactccagtctgggcaacaagcacgaaactccatctcaaaaaaaaaaaaaaaaaaaaaaaaaaaaaacagatttccagatgaccagtgtgcagcccgagccgagagtctgctttagaccagagctgctcagactgtaatgtgcatgcaagtcattgagggtcgagttaaaatgccagtagattcagtggctctggggtggggccccaggctgtgttgctatcaagcctccaggtggtaccactctactcactgcagaccccgtaggcagtgtggtcacttggtcaattgccatttaagactcactaggggccaggtgtggtggttcacgcctgtaatcctagcactttgggaggctgaggcaggcagattgcctgagctcaggagtttgagaccaccctggggtgaaaccccatctctactaaaatacaaaaaattagccaggcttggtggcatgtgcctgtaattccagctactcgggaggctgaggcacgagaattgcttgaacctgggaggtaggtggacgttgcagtgagccgagattgtgccacttcactccagcctgggctacagtctccaaaaaaaacaaaaaagagattcagtatatcagctactcacagttgaccctgaagatctctgggaagtagtgactcatgactcgtttatttattaagttttgctgtagcagaagtttacttttgagccaagagtctgatccggtctccctcttttttttttttttctttctttaaagagatggggccttgctatgttgcccaagctggtcttgaactcctggcctcaatccatcctcccaccttcggcctcccaaagtgttgggattacaggtgtgagccacctctctcaggcaagagcccctcttttaactagacaatgaacctggtttctgctttggacaggctatttagttcctgcttatttaccctcatggtgggagagaccctggtgggatttggggtgaaagctggctgtggttcttgcaggagcctcatgacacctgagggaggtgtgatcaggcaagactgggcctctacactgagagccgactagggcaggtctcagaagcagagactgaaggaagttgggtggatgagtggatctggggagcaggggccaagcctgagggctgggcagagccttccaaaggtcaacacaatccttgctattgtcttttgagggccctgatctattttaagtaaaatgctctaactgcgcatgtcatctggaaggaaaccacaaaaaactcaatctgagacttgtcaccaatgtgctgcctgagtcaaagggtttccctggctcacctccatagatggcgagggtagaaggcaagacctgtcctgggtggtctaggcagaaggcccaggtttagggcatggcaggtgggtggtcagggaggtgaggtggggtcctggtgctgatgcaggggcagttgccgagggcttggcctcagaacaaggcaggagtccagccatgaggatgactcttgctgagtcactgagctgggcgaggcattcagaccccctgactgggcccagctggggcggcagatggtggagaggcctcagctgtggggggtgttggggagattatccactgatgaaccaaatggaggctgttcccagagcctgcttccaaccttgcacggccttctagagttcaaatctttcctgggggggcctcagagccctgtccatacctccgctcacagccccagcccttcctcttctcccatctggtttcctggccaggtttcggccctgcggagaaccctccaagggagcagtggaaaaagcttcacttggcagtaaagcccctacttgctgttccatccctgcagctggggtgaaataagccactgaccagtaaacaactgaggcttaaaccagcatgccagctcaggtggggagcccccagcactggttatattccctagattcctcactggataggaaagttgggcctcaggcactcttccctcctctgcagtcaaacagtgcagatgaagagccaggctctgttcccagtgctttatgtgctaacttggttgataatgttatccattctcattttgtagatgaggaaacaggcacagggtggtcaagggacttgttcaaatcactgatcccataagggtgagagccaagatccaggcatcctggctgggtgcggtggctccacctgtagtcccagtgctttgggaagctaaggctggatgactacttaagaccaggattttgagaccagcctggacaacaaagaccttatgcctacaaaaaattaaaaattagctaggtgtggcagtacgtatctacagtcccagctactcgggaggctgagatgggaggatcccttgagctgaggagttcaaggctacagtgagctgtgatcactgcactccagcctgggcaacaaagtaagaccttatctcaaaaaaaaaaaaaaaaaaaggccgggcgtggtggctcacgcctgtaatcctagcactttgggaggccgaggcgggtggatcacaaggtcaagagatcaagaccatcctggtcaacatggtgaaaccccgtctctactaaaaaaaaaatacaaaaagttagctgggcatggtggcaggcgcttgtagtcccagctacttgggaggctgaggcaggagaatcatttgaactggggaggcggaggttgcggtgagccgagattgcgccactgcactccagcctggcgacagagtgagagtccatctcaaaaaaaaaaaaaaaaaaatccagatctaggcattcccagccctctggactctaggaagtcgtctttccagaacagagccccgtattgtggagcaactggggggtggaatcaaaggtgagcaggacagggctataggaagaaaagacaaggtccccataagagtggcgagaggaacagagccaggacatcggaaagcaagcccctgtgttcccaaaccgcagaagagggagctctgatgttagacaagccaccctcctacaagcgaagggaaagtaactttgagcaaaaatgagcaacagaaaatgagatcaaggtcagatctcatacaaagttgcaagatgaaagaatgagcagcagaataacctccctgtgatgtggaaagtgtgccaggaaaacagacccaaactgtaacctctttcagaatgaggcaaggcagtgaggaaactatgtgaaaacacgaaagcagccgatcagagttgtaagcccgggcagtctgggttggaatgggtgccccgagccacgggaccatgatgcctctctagaaagacaggaccaggcattccaccagggttctagtcccaacagcaccactaacttgcttgtggccctaaaggattcattgtccctctctgggtctcaactatttagagctctactgtccagtatgggatcaaccagccatatttggcaatttaaattaaaattagctgggtacggtagcgtacccctgtaatctcagcactttaggaggctgaagcgggaggattgcttgagcccaggagttcgagaccagcctaggcaacatagcaggaccttgtctctgcaaaaaaaatgaaaaaattagctaggcgtggtggcacatgcctgtaatcccagctactcgggaggctgaggtgggaggatcacttgagcctggaggttgaggctgcagtgagtcatgattgtgccactgcattcctgcctgggcaacagaacaagaccttgtctcaaaaaataatttaaaaatttagttcctcagatgcattagccacattttattttatttttttccaagacagagtcttgctctgtcgcccagggctgtagtgcaatggcgagatcttggctcactgcaacctctgcctcccaggttcaggcaattctcctgcctcagcctcccaaatagctgggattacaggcacgtgccaccatgcccagctaatttttgtatttttagtagagacagggtttctgcatgttggccaggctggtctcaaactcctgaccttgtgatctgccgacctcagcctcccaaagtgctgagattacaggtgtgagccagcatgaccggccattagccacattttaagtgttcaggagccacatgtggatgtggctagtccaaagacagcacagatttagaatattctcatcattgtagaaagctctattggacgctgctgagtaaaagggtttttttggtttggttttgagattggagtctcgctctgttgcccaggctggagtgcaatggcacgatctctgctcactgcaacctctgcctcccaggttcgagcaatcctcctgtctcagcccccctagtagctgggattataggtacccgccaccacaactggctaatttttgtatttttagtagagacggggtttcgccatgttggccaggctggtctcgaactcctgacctcaggtgatccacctgccttggcctcccaaagtgctgggattacaggcttgagccaccacgcccggccaagttaaagggtttttaaacaagagctgggcagtgcaatggcatagctgtaaggcagcagggggtggtggggactgtggtaggtgggaaagcttgtgttccatctaaatggggcagctgctgcttgactgtaggctgtattgctggtcttctaattcttcaagtgaatcaggaattgggattttgtgaagactcacaatttctaaacaaaaagttgaagttttacagatcgtggggctcaagtataactcctcttgggctgtatccagccttgattctgtaatctgtggctcctgcctgtttttcctcggccaggccactcccttcttcccctcacttatatttttcacctggggttggaggctgggtagatggtggaattgatgaggaaccacttttttttttttttttttgagatggagtctcactctgcctctcataatgctgggattacaggcatgagccactgcacctgtcctggccagacatttttgaggccaccaccagacaaaagaggctcctcatcggccaggtgtgatggctcgcctataatcccagcactttgggaggcagaggcaagaggattgcttgaggccaggaattcgagaccagcctaggcaacataatgagacctcatctctccaaaaaaaaaaattagctagacatggtggcatgtacctgtagtctcagctacccaggaggctgaggcatggcttttgtgagctatgattgcaccactgcactccagcctgggtgacagagtaagactccgtctcaaaaaaaaaaaaaaaaaaaaaaaagtctgacctgagtctcttaaggatgaggctctggagcacctagtaaacttggtcccatttgtgtgactcaaagggacatgtccaaagtccaaagtgctgggggcaggggtggggcttaggtagggcatgtgacattcctgaacaggccaagcactgggtgaaactactcaggattcagaagcaggtgggatgggtgggtggaacatgataatcatcccccttctccttcctttccaccctacccttgctcacaactgcaggagctgaggatgggagagaactggggacgagggggccagagtgatttgcagtgttagtaatgcagctggttctatggaaggctcagttccatctgggatccctttatgagcagtggactaggtcttcacattcagcccaggattactaaagcataggaaagaggcagggaacatagacacagctcatgtaaacattccttttgtttatggccgaatcctagccactggactacctgaggcatacagatattctttggctatgggctgacatttgaatacagctggggcctcaggattctctgaaataaagggctgcctccctctggaggagccaggcagctcctcagagcagctgcccattgcgtgctggacaaggccatgtcaccacctccatggctccccagtttcccagcttgctgtatctctccaccgtaagagactgggagcaccttgatctgaagctctttgcagtgccggtggcagtgtagggggaagtagttgatgggagtgagggaaaggaattggcaaggaaccctgggcctctgtggctcactgcatcaagcagttcttggcaaaggtaaggtcaggatgggctgtgtcgtcttgggtggggtgaagacagggagcagtgggcatgcagatgcggacagggaagggtgcagtggcctggctggaggaggtagggccgtatcccacccagagtctgtcaccagattcatgcctgccccaccccaggctccccaggttcatcctgtgtcgtctcccccacctaccagtcatcttcttgtgagccctgggcttaggagtcaccatggcaactgaagagttcatcatccgcatccccccataccactatatccatgtgctggaccagaacagcaacgtgtcccgtgtggaggtcgggccaaagacctacatccggcaggacaatgagaggtgggtgtgggggctgggctgtgggggatccttggggatgtgggggcctgtttggctggcatgatggtccttatcctcctccctcttcccaagcaggagtggccctcgcttgggcgatagagaggtttctctctcatttggtgtcctctttggtagtggagacctggtcccaggtcctcacacctcttctcatcttcctgcagggtactgtttgcccccatgcgcatggtgaccgtccccccacgtcactactgcacagtggccaaccctgtgtctcgggatgcccagggcttggtgctgtttgatgtcacagggcaagttcggcttcgccacgctgacctcgagatccggctggcccaggaccccttccccctgtacccaggggaggtgctggaaaaggtacctggtttcctcactccctatgccccaccctacctgtcctccacctgccttgggctctatactgctgccttcttcttctttttttcttttcttttttgaggcagagtttcactcttgtcgcccaggctggagtgcagtggcataatctcggctcactggaagctccacctgggttcaagtgattttcctgcctcagcttcctcagtagctgggattacaggcacccgccaccacgcccggctaatttttgtatttttagtagagacagggtttcaccatgttggccagtctgatctcaaactcccgaccccaggtgatccacctgcctcggcctcccaaagtgctgggattacaggcatgagccactgttcccggcctgtaccgagttctaaagggaaaacaaaccagggcagtgggaggggtggggagagacacttgctggctctcaccaagggtggaattgactcactgtacctccactcacctccagccacccccatcctccacacatgccccaaacacacctgcctcttttctgagaactgttggcccatctcaccttcccaggctccagagcctaccagaagtgcccagccagtctggcattaaatgacatgtgccaaggttaagcagttcattcacccggtgccagacactggtgggcagtgccaaagcagcagtgacaagcccaggccccaggctgtgcctgttctaggagaagccatcacaggcctgaacctacagccaggctcttgtccccgttggcctcaggcctgggcctgagcaggtgggtgtcccaccttcattcctttacctgttcttccacctttaccttctggccatttaatggttttgggttttttgtttgtttgtttgtttgtttttaatagagacggggtttcaccgtgttagccaggatggtcttgatctcctgacctcatgatccgcccgcctcggcctcccaaagtgctgggattacaggcatgagccaccgtgtccagccccatttaatggttttcttactgactttactaaccagtgctgcttgatcctgaaagcataatagcagaacatggggaacttttagagacattcatgtccacttaggtgcagacagtttgggggaagaagtgtgtgtgtagagagaaaatgaagaatgattaagacaataacccttaaggaatccaagtgaaaagtatatagggattcttgtacctttttttttttttttttttttttgagatggagtctcactctgttgcccaggctggagtacagtggcataatctcggctaactggaagctctgcctcccaggttcacgcaattctcctgcctcagcctcccgagtagctgggactacaggcgcccaccaccacacccggctaactttttgtgtttttagtagagatggggtttcaccgtgttagccagggtggtctcgatctcctgacgtcatgatccacctgccttggcctcccaaagtgctgggattacaggcgtgagccaccgcgcctggcctttttttttttttttttttctggatctccccctgttgcctagacgagagtgcagtggggtgatcatagctcactgcagcctcaacctcctgggctcaaacgatccttccacctcattctcccaaaatgctgggattgcaggtgtgagccaccaagccctgcctaagctttcattttaaatatgttcagccgggcacagtggctcacgcctgtaatcccagcactttgggaggccaaggtaggcagatcacttgaggtcaggagtttgagaccaggctggccaacatggcgaaaacccatctctactaaacatacaacaattagccaggcgtggtggcatgcgcctgtaatcccagctacttgggaggctgaggcatgagaattacttgaacctgggaggcggagattgcagtgagctgagattgcgccactgcgctccagcctgggtgacagagcaagactctgtctcaaaaaaaaaaaaaaaaattagctgggggtggtgacacacctgtaatcccagccactcaggaggctgagacagaaggatcacatgagcctgggagattgagactgttgtgagccatggttgtaccactgcagtccagcctggatgacataggaagaccccatctccaaaaataaaaaaaagccagctcttcctttgagccccagtttcagttcaaagggccttctctaacttctccttcatctgaactcctgagacagggtcttgctctgctgcccaggctgaagtgcagtggtgcagtcatagctcactgaagccttaacctcctgggctcaagtgatcctcccacctcagcctcccgagtagctgggactacaggtgtgcgccgccaccatgcctggctacactttttttttttttttttttttttagagatgggatcttgctatgttgcccaggctggttcttgaatgtctgaggtcaagcaatcctcctacctcagtctcccaaagttctgggatgacaggtgtgagccactgtgcccggcctccaccccagtcttatttcaggacatacagagatggatgttgtggacccgcctccagagcatcaggcttggccctggggtcacagcactgatggttctgtgtctccaccttcttccccactaggacatcacacccctgcaggtggttctgcccaacactgccctccatctaaaggcgctgcttgattttgaggataaagatggagacaaggtggtggcaggagatgagtggcttttcgagggacctggtaagttctgtctccatagggctccctgccttcctgtcatagccctgataccttctgaccatcaccttccctccccaggcacgtacatcccccggaaggaagtggaggtcgtggagatcattcaggccaccatcatcaggcagaaccaggctctgcggctcagggcccgcaaggagtgctgggaccgggacggcaaggagagggtgacaggtggggtcaccaaggggcgatgatggtgggtgggcaggaggggtccccactgcaggggaagcaggggaaggttgaggaaagcctcctgtagccccagagaggcgctttcctggtatcttttgaaagctgttgagggccacccactgctcttccttccccacccccgcttcatgctgtttccacttgggctggaaaatgtgaccatgaccatgcggatgtggcttttccttccctcaccttcaccatgagctgtgggcagtggccatgacttacctgattctggatcaacaaagaagatgttcaaatacaattgacaaatgtaggccaataggtacagtggctcacacctgtcatcccagcactttgccaaggtgggtgaatcgtctgagcccaggagcttaagaccagcctgagcaacacagtgagaccccatctctacagagaatttaaaaattagcctggccttggacacacacctgtggtcccagctactcagaaggctgaagggggagaatttcttgagcccaggatgtggaggctgcagtgagctgtgactgcaccactgcactccatcctgggccacagaggtactaccccgaggtgctaccattcccactttttttttttttttgagacggagtcttgctttcttgctgttgcccaggttggagtgcagtggcgcgatctcggctcactgcaagctccgcctcctgggttcacaccattctcctgcctcagcctcctgagtagctgggactacaggcgcccaccaccatgcccagctaattttttttttttttgtattttttttttttttttttttagtagagacagggtttcaccatgttagccagggtggtcttgatctcctgacctcgtgatccaccaggttcggcctcccaaagtgctgggattacaggcgtgaaccaccgcacccggccattcccactttctatatatcaaaactgggatgcagaatgcaggttgcttgccctggggtgtggccaggcagggcgaggctgggacctgcatccaggcactctggcttctccagtaaaccaaaggacatccacaactctaacagaggcagttctgctgcctgttttagcagaaggacaaaagttggtctttggagcttagagaaggcagaacaggctgttggcatagcagcaacttgggcatcttaggaggccaaggtgggcggatcacttgaggccaggagttccagactagcttgggcaacatggtgaaacaccatctctacaaaaaatacaaatattagccgggcgtggtggcacgtgcctgtaatcccagctactcaggaggctgaggcatgagaatcacttgaatccaggaggctgaggttgcagtgagctgagatcacagcctgggcaacagagggagactccgtctcaaaaaaaaaaaaaaaaaaaaaaaaacttttaaaattcaactggggtgggggtttggcctcaaaagaatgaataagaggaccgcagtcaggaacttgagcctggggtcagtgctatctttttgcctatgaaatctgtcaatcccctgtgtctaagctgtgggggaggggtaggtggggagcaggctggggggcccttgtcccttaccctccactcttggcccaggggaagaatggctggtcaccacagtaggggcgtacctcccagcggtgtttgaggaggttctggatttggtggacgccgtcatccttacggaaaaggttggtgctctgggggctgtggtttaagggacctggggctagggaaccctccgagtggcagagaatggtggtagaatggcatgagagtaaaagagaagcaataattttagggtcacttaaaaaaattcagagatcagattgcctgagtattctggatcatctgaagggttaaatagtctttctggggctgggcgcaatgactcacatctgtaatctcagcaatttggaaggctgaggcaggaggatcacttgaggccaggagtctgagaccagcctgggcaacacagtgagaactcatcgctacaaaaaatttaaaaattagctgggtgtagtggagcatgcctgtaattccagttactccagaggcgctgaggcaggagaatcgcttgaaccccagaggcagaggttacagtgagccatgatcatgccactgtgctccagcctgggcaacagagcgaaaccctgtctcaaaaaaaaaaaaaaaaaacaaagccggtcgggtgcagtggctcatgcctgtaatcctagcattttgggaggctgaggtgggaggatcacctgaggtcaggagttcaagacaaacctggccaacatggcgaaaccccatctctactaaaaatacaaaaattagctgggcatggtgtcacccacctgtaatcccagctgtactcaggaggctgaggcaggagaatcgcttgaacctaggaggcggaagttgcagtgagctgagatcgcacctttgcactctagcctgggcaacaagagagagactccgatttaaaaaaaaaaaaaaacaatccctggattggtagaaattgtctctgagatctgggagcattgggagcatttggtggccaatggggctcgcagatcccctgaagttggaggcaggtcactcaaatacccaacatgttgctctgcagacagccctgcacctccgggctcggcggaacttccgggacttcaggggagtgtcccgccgcactggggaggagtggctggtaacagtgcaggacacagaggcccacgtgccagatgtccacgaggaggtgctgggggttgtgcccatcaccaccctgggcccccacaactactgcgtgattctcgaccctgtcggaccggatggcaagaatcagctggggcagaagcgcgtggtcaaggtgaggtccctacacccccacagaggactgccctgggagatgtatgtcctctagtggcatgaggccctctgccttctctcctccagacgcacgttctaggaacaccttctgtgcctttgcatgcttagttcttacacacctgagacactggcccatttgattcctggcagcctctgacttacccctcagacctgaagttaattccccttctgggaaggcctcctggctacccgctgcctgagactctgaaactctgatacagtcatgcgccacttaatgatggggatacattctgagaaatagtccttagatgattttgtctttgtgcaaaagagtgcacttatgcaaacctagatggcacctagtctagatggcgtagcctgcccctaggctgccaacctgtgcagcatgtgactgtcctgaatactgcaggcagctgaacacaatggcaagtacttgtgtatctagccatagaaaaggtaaggtaaaaatacaatataaaagcttcgttataggccagcacagtggctcatacgtgtaatcccagcactttgggaggccgaggcaggtggatcacttgaggtcaggagttcgagactagcctggccaacgtggggaaaccctgtctctactaaaaatacaaaaattagccaggtgtggtggcacacacctgtaattccagttactcgggaggctgaggcacgagaatcacttgaaccctggagatcaagcctgtggtgagccgagatcgtgccactgcactctagcctgggcgatagagtgagactctcagaaaaaaaaaaaatctccattataatcttacgggaccaccatgtgcagtctgtaatggactgaactatcatgcagtgactatatttcacatctttaatatcctggtgttcactttgctttgtcatcttttgtaaaataaacctcttggtttaccctctcccaccccctacttcatcccctctctgaactatatgtgggaataccagcagttgccaaactcattctgtaaagggggctggatggtagatactccaggctccgtgagtcattgtttctgtggaagttcttcaactctgctgttatgtcaggaaagcagcttgggcactacgtaaacaagtgagtactgccatgctcctggaatagtttatctgcaaaaacaggaggcagaaaaagtagaaataggccaggcatggtggcttacatgtgtaatcccagcactttacgagtccaaagcgggtggatcgcttgaggtcaggagttagaaaccatcctggccaacatggcaaaaccctttctctactaaaaatacaaaaaaattagctgggcatggtgtcaggcacctgtaatcccagcttctctggaggctgaggcaggagaattgcttgaacccgggaggcggaggttgcagtgagccgagatcacaccactgcactccagcctgggtgacagagcaagactgtctcaaaaaaaaaaaaaaattagaaataacccaaatgtacatatataatgaatggataaaaaattgtagcatatccatacaatggaatatcattcagccataagaaagaaatggcaggccaggcgcaacagctcatgactataatcccagtgctttgggaggccgaggcaggaggattgcttgaagccaggagtttgagaccagcctgggtaacatagtgagaccccatttttacaaaaacttttaaaaattgaccaggcatggtggcacacctgtagtcccagctatttgggaggctaaagtgggaaaatcgcttgaccccaggaagtggagtgtatagtgagctatgattgtgccactgtactccagcctgaggcagtagagtgagatcctgtctctaggaaaaacaaaaaataatgacatacgtgctacaacatggataaaattgaaaatgttatgctaagtgaaagaagccagctggacgcagtggctcacgcctgtaatcctaacactttaggaggctgaggtgggcacatcacctgaggtcaggagttcaagaccagcctggccaacatggtgaagccccgtctctgttaaaatacaaaaattagctagcatgatggcgggtgcctgtaatcccagctactgctcgggaggctgagacaggagaatctcttgaacctggaagacagtagttgcagtgagccgagatcccaccactgcactccagcctgggctgctgagccgagactccatctcaaaaaaagaaaaagaaaaaagccagacatcaaagaccacatattgcatgattccatttatgtgaaatgtccagaataggtaaacacataaagaaaatagactagtggtgggtggggtaggtggggagtggcagtaacttctaggtacaggatttcttttcagggtgatgacgaaaatactctagacttaacatagcagtgatggttggacaactttgagtatactaaaacaactgaattgtgaattgtatactctagatgggaaaatttcatatgtggattatatctcaaaatttttttaagaaacaggcggtgctgggcgtggtggctcacatctataatcccagcactttggaaagctgaggtgggtagatcgcttgagtctaggactttgagaccagcttaggcagcatggcaacaccccatcatctacgaagcacacaaaaattagctgggtgtggtgatgcgcatctgtagtcccagctccttgggaggctgaggtgggaggattgcttgagcctggaaggttgaggctgcagagagctgagatcatgccactgcactatccagcctgggcaagagaggaagactatctcaaaaaaaaaaaaaaaaaaaaaaaaaggcagaatccagatttggcctgaaaaccagagtttgtcaagccctaggttacaccatctctagaaaacaaagcctgggagaaagaagaaaaaacaggttgatttttaatggtttagcttgcgtggatccaggtcctgacagttatggaatctttcaaggacacatttgaccagatgagatttggcaggcgtttgtgtagagcctcacagtccagacagtgcctcaccgtattatgatgtgggggtgggggcgggcttctggtgctcttgtcctccacacaggcctgaaacagcacaggactggggaggtaccattggaagcacccgcaaccctaaaggcactgaccctaacctcacgtctccccactagggagagaagtcttttttcctccagccaggagagcagctggaacaaggcatccaggatgtgtatgtgctgtcggagcagcaggggctgctgctgagggccctgcagcccctggaggagggggaggatgaggagaaggtctcacaccaggctggggaccactggctcatccgcggacccctggagtatgtgccatctgccaaagtggaggtggtggaggagcgccaggccatccctctagacgagaacgagggcatctatgtgcaggatgtcaagaccggaaaggtaatggctgggagtgagcagcagtgctgccacgtggccttggccttggtggcggcttcctctgggtgtgtggaagaggtgggcagggacttcagcagcatggagagccatatcaggtgggctgtctggttgggggagggcactacgtggagtgtttgccatccttctgccttaaatgtctcatttgaaatgttagaaccaaccaggtgcggtagctcacatctgtaatctcagcactttgggaggccgaggcgggcggatcacctgaggtcaggagttcaagactagcctggccaacatgggaaaccctgtctctactaaaagtacaaacattagtcaggcgtggtggtggtctgagtagtcccagatacttgggaggctgagacaggagaattgcttgaactgggaagcggaggttgcagtgagccgagatcacaccactgcacttcagccagggtgacagagtgagactctgtcaaaaaaaaatattagcatgtccactgagaggacaagtgggggtttaggacagggaccctttcccacagcagacctggtttccagcataaaggtctgatggggtggccagggaacaggaaggacctcctccctcatgcccatatcccggtggaatctttcatttttttctgcttcacctaaaaccttgaccttgatttgacctcgggccacatctccaaccttctctaagaatccaagctggaagtccagcttggaatccgagggagcatccgtgtacacagcctacttcaccatccccgaggtgccctccaaactgccccatgaaggaagattctagaaataacattgagcaccttctctatgccaagagctgtttgagctagacatgtgaagatgtcattcacccctagaccctgcaaggtagccaccgtcaagtccacttgacacatgaggaaactgaagcccaaggggtgaggtagttagcccacgatgacagggccagcagatggcaaacccggggtggagcctggcctccccgtagagaaggtgtttaacctcgtggcgcgccttccctggatgggctctgctttgggacagctgggcggatcttcctcccttccacccttacgggcagcttccctccctgtcctcgtcccaaggtgcgcgctgtgattggaagcacctacatgctgacccaggacgaagtcctgtgggagaaagagctgcctcccggggtggaggagctgctgaacaaggggcaggaccctctggcagacaggggtgagaaggacacagctaagagcctccagcccttggcgccccggaacaagacccgtgtggtcagctaccgcgtgccccacaacgctgcggtgcaggtgtacgactaccgagagaagcgagcccggtgagtgctggcagcgcagggtgtagggggtggctctccatgggtctggctctgaccctcggctgtctctgcagcgtggtcttcgggcctgagctggtgtcgctgggtcctgaggagcagttcacagtgttgtccctctcagctgggcggcccaagcgtccccatgcccgccgtgcgctctgcctgctgctggggcctgacttcttcacagacgtcatcaccatcgaaacggcggatcatgccaggctgcaactgcagctggcctacaactggtaaaaatggggacagggcatgggggtgcattcctggaatcccagcactttgggaggctgaggtgggaggatcacttgagcctaggaggtccaggctgcagtgagccttgatggccccactatactccagcctgggtgacagagcaagaccctgtttctttgttttttgtttttttagttttttggttttttggttttttggttttttttgagaccgagtttcactcttgttgcccaggctggagtgcaatggcgcgatcttggctcactgcaacccccacctcccggattcaagcgagtctcctgcctcaacctcccaagtggctaggattacaggcatgtgccaccatgcccagctagttttgtatttttagtagagatggggtttctccatgttggtcaggctggtctcgaactcctgacctcaggtgatccgcctgcctcggcttcccaaagtgctgggattacaggcatgagccactgcacccggtcaaccctgtttcaaaacaaaaaaaacaaaccgggtggcaagcagtgggtgagggttcctgctgggtgcagcctaggaaccccaagaaaaggagggtcctgctcaagtgctggtgctgggctcctcatgaaggcaggacacctcattcagtgctgaggtcaagagggaacctaggagttcacgcaaatccagggaaggcgtgggctcacctcctggggtcaggactcagggatccagtagcaggacactaccccaactaagctcccagtgagcgtgcagccaaatgcgtaactgtcgggctgttaaaagatgcatgggacacagctggcgggagtgggcagtgcaagggggcggtgagaactcaagttcagaaactgactgccctggcctgcgcccccgccctgctgtttgcagcctgtggacctggggaagggacagggtgctttcctcagtttccccatctgtaacatgaggaagacagcattttctccttcacaaggccattgaaaagatgcaatgagtgttagaacagtgcctctattggtcagagctcaatagcagctattaggattgggtgagataagtcatgtacagaaacagtgttcatgactgggtactgtggctcacacctgtgatcccagcactttgggaggctgtggcaggaggattgcttgaggccaggagtttgagaccaggctgggcaacataacaagactctgtttcaaaaaaaaaaaatttataaactagctgggcatggtggtacatgtctatagacccaactacttggaaggctgaggtgggaaaattgcctgagcccaggaatttgaggctgcagcaagctatgattgtgccaccacactccagcctggacaacagagacccacagagaccctgtctcggaggaagggaggaagggaggaagggaggaagggaggaagggaggaagggagggagggagggagggagggagggagggaggaagggaggaagggagggagggagggtcaggcgtggtggctcatgcctgtaatcacagcactttgggagactgaggcaggcagatcacttgaggtcaggagtttgagaccagcctggccaacatggtgaatccctgtctctactaaaaatacaaaaattagccaggcctggttgtgggcacctgtagtcccagcttgtagtcccagctactcaagaggctgaggcaggagaatctcttgaatccgggaggcggaggttgcagtgaacccagatcgagccactgcactccagcctgggcgacggagcaagactgtctccaaaaagaatattcaatactcccaagcatgtccctcacctcttagctgagagcagccagtgccctgatggcggcagacagctgccgacatattcccagggctgccgacatattcccaggcactacaacatcatagttaagagcacaggccccagaagcagctgcctggttcagctttctggcttgtcacatgttatatggcaagtcttgggccagccacttgacttccctggacctctacttcctcatctgtaaaatgggggtggtgatcattgccatctcatagggtggctgagtgggattaaaggagaacgtgtgttaagtttttaggaccttaccaggcatacattagcattctctattgcgagagaccctgcccggccacacaggatgggtgttgaagttcttctcggagagagttgctggctgggcgtgatcacacatgtagtcccagcactttgggaggctgaggttggggggttgcctgagcccaggagttcaagaccagcctgggcaacatggcaagaccttgtctcttctaaagagagattcctgggtgaaagcagcttccccattctgggcctgtttgttcacaggcactttgaggtgaatgaccggaaggacccccaagagacggccaagctcttttcagtgccagactttgtaggtgatgcctgcaaagccatcgcatcccgggtgcggggggccgtggcctctgtcactttcgatgacttccataagaactcagcccgcatcattcgcactgctgtctttggctttgagacctcggaagcgaagggccccgatggcatggccctgcccaggccccgggaccaggctgtcttcccccaaaacgggctggtggtcagcagtgtggacgtgcagtcagtggagcctgtggatcagaggacccgggacgccctgcaacgcagcgtccagctggccatcgagatcaccaccaactcccaggaagcggcggccaagtaagtgaggctgggagctcggctgcctataatgcccatggcaggccactgctgggaactggataacctggcatcccttgtggactgcctgctgccatccctaccctcaaagatctattccctacccaacagatcaggtgacccacttaaaatgtgaatcaggctgggcgcggtggctcatgcccgtaatcccagcactgtgagaggctgaggcaggaagatcacttgaagccaggagtttgaggctgcagtgagccatgattgcgccactgcactccagcctgggcaacaggcctgggagactgaccctgtctcaaaagaaaaaaaaaaaaaaaagcacgtatcagatgtggctcctgcagcctcccatcttgcatgtgataaaacctaaactccttcctgcagctccagccggcctcccccgatttgccttctagcctcccccttccatgctcctcgtccctggaacatgttccagctgacatgttccagccccactggcttcctctgctccttcaatgcacagcttggacccacctgaaggccttttgcaatggctattcctgctgcccagaaagcttccccccgcccctgagctcccttccaggcaggcttctccttctggcttcagcccaaagatcccctccttggggaacacttttctttctctcacagctgaatagcaccctctttgcctggtctctcccacacttgtcactgtctgaaatcctccttgtatacttgttcttttcccactcaagtggcgtgaaagtagggggccgcagtcacgcctgcatttgtccggcctagaatgacactggcttgtggcgcgtataccattctgggttgagttgcgtattgggtgccttctaggggctggggtctgtcctgggcaccggtttggttggtggccgctgcccttggcgctcctgttcctgctctggccccatgccagcctctcacctgcgctccgtctcctccaggcatgaggctcagagactggagcaggaagcccgcggccggcttgagcggcagaagatcctggaccagtcagaagccgagaaagctcgcaaggaacttttggagctggaggctctgaggtgggttgagaactagaggaggagactggcaggggccgagggtcttaggacagcagctggtgtgggcagcaggcctgggtggggtgtcgatgagacagtgcacggctacagcataagccaaggccgtggggggactgggctgtctcccgggtcttacctgactctgccttctccccagcatggccgtggagagcaccgggactgccaaggcggaggccgagtcccgtgcggaggcagcccggattgagggagaagggtccgtgctgcaggccaagctaaaagcacaggccttggccattgaaacggtgagtggggggaggcattaagaagagggtggccttgagtcctggaaaaggcccattccctacagtccctgagactgtataggacaccaggtcccccaacataaagccctatccaagtactttgcatttgcaaagtcctttgccttgtaggattcattgactccattgctggaaggtaaggattagaacacccattttgcagctgggcgctcatgcactggccaccttggcacaagtgctgtgtatgcttcataggcattatcttatttaatgcttgaaatcccattaagaggccgggtgcagtggctcacgcctgtaatcctagcactttgggaggccgaggcgggtggatcacctgaggtcaggagttcaagaccagcttggccaacatggtgaaaccccatctctactgaaaatacaaaaaattagctgggtatggtggcatgtgtctgtaaccccaactacttggtaggctgaggcaggagaattgcttgaacccaggaggtgtggaggctgcggtgagctgaggttgtgccactacactccagcctgggcaacaagagtgaaactccatctcaaaaataaagtaaataaaaataaatgtaaaaagaggcctagtgtggtgcctcaggtctctaaccccagcactttggaaagctgagatgggaggatcatttgaggtcagttcgagaccagttcaagactagcctgggcaacatagcaagacctcatctctacaaaaacaaaattttttaattgactgggtgtggtggcacatgcctgtagtcccagctacccaggaggctgaggcaggaggatcctttgagccaggagttcaaggctgcagtgagtcctgatctgcattccagcctgggtcaaaaaataaagaatgattgatttttcctcttccaggaggctgagctccagagggtccagaaggtccgagagctggaactggtctatgcccgggcccagctggagctggaggtgagcaaggctcagcagctggctgaggtggaggtgaagaagttcaagcagatgacagaggccataggccccagcaccatcagggaccttgctgtggctgggcctgagatgcaggtgagagttggggaaggtgtgttggtttcaggaccaaccttgaaaccaggaaggcagagccaaggcggaaaacacaacatctggaaagattgtggggaagggaggggtgagtgacctgacccacgatgcagggacattcacacagtgtcacgctgcatcaacgtcaggcactgtactagacccagcagtgagccagagctccggaggagacaggaaatggatgggacgccagtctgacaggcatttccaaggcagtcaagcagggtggtcagatgcaggggaggtgacccttcaaaccagctgacttaaggagggtcactctgaagtggccagggtttgacgcccatctcaacttcctcctgttctcaccctccaggtaaaactgctccagtccctgggcctgaaatcaaccctcatcaccgatggctccactcccatcaacctcttcaacacagcctttgggctgctggggatggggcccgagggtcagcccctgggcagaagggtggccagtgggcccagccctggggaggggatatccccccagtctgctcaggcccctcaagctcctggagacaaccacgtggtgcctgtactgcgctaactcctgattaatacaatggaagtttctgggc

SEQ ID NO: 65 - DNA, 4901 bp, Homo sapiens
tcattgacagacgagtatttattaagcagctactatatgccaggttcaagttggtcttactctagggatagagaagagaacaagaaaagtctgtgccttcatggagtttacattctagtgagggtagaaaatatcaagaatataaatacatgtagacagtcagtgacatcaaacaagtgggcggtggggacaccacatgagcatgggtggcaggagggcctctctgtgaggtcactgtgggtagacggagaagccagccagcaaactggaggaaaagcacccagacggacgtccttccctaagctccctcaacccaggccctgagccaagaatatctgaaaggaaaccaagtcaaatagtgaagtcccgccaggaccagggtaggcaggacagaggagccggtgacagggaaggctgtggatggcttcttccctcctgggcatggtgccccaagcttgctctggctgggggcggaggtctgactcccgcctttcaggaaacctggccctcacaccacctccctcactcaagcgtccctagcatctcggaccccaggactgagcaggcagggtgtgacactgcccggtcccggcaccccaggagcaccgcctggatggagggggcctcccgcgtatcctccctgatttgaggcccgggtcctcaggatcccagagaacgtgacgtcaccaaagagaggctgacccccatcccagcaggtagaacaacacatgaggaaggcgtgagactgggacctcctagcagggggtggggagctgtgtggcacagcaagactcccagggcaggtgggcagccaggacccggggctccagcgtcacttcttcttggcgcggtctgctgcgtccagggcagccatgttgcgggcggccgtgatcaggtggatgacgctgatgagcgacttcagcaaggcgatgggggcagtgacccagaggcccatccggaacagtcccacagagccaactgcaggaaggcagcaggggagtttggggcccgaaggagggggcctccatctccctgggcaggccagatccccctcccatcctcctgcccagcccctcatctcctacctaaaggtccctcagagaaatggaacaggtagaggaggcagtagaagagctcattcccagcacacaaggtgaacagagcaggctgcacacacagcaaacaggccacgttagcaagaggcaggcgtgtgccaccccctgcccccccagcactaatgaaggcacaatctcggcatattacttctcttatttttttttcttttttacagacagggtctcgctctctcatccaggttggaatgcagtagtatgatcatagcactgcagcctcaaaactcctggtctcagccaggcgtgtggctcatgcctggagtcccagcactttgggaggctgagacaggcggatcacctgaggtcaggagtttgggaccagcctggccaacgtggcgaaacccctctctactaacaatacaaaaattagccgagtgtggtggcacgtgccggtagtcccagccactcaggaggctgaggcacaagaatcgcttgaacccagcaggcagaggttgcagtgagccgataacccgccactgaactccagcctgggtgacagagcaggactctgtctcaaaaaaataaataaataaataaataaacccttggtctcacgcaatccttccaccttagcctcctaagtagagactacaggcgtgtaccactgtgcctggctaagctaattcaagattttgtgtgtgtgtggaaacagagtctcactttgttgcccaggctggtctcaaactcctggcctcaagcaatcctcccacctcagcctcccaaagcgctgggattacaggcatgagccaccatgcccagccattatctttttaaaaatccttccagaggctgcctgtgttcctggaatcaagtccacactccagccctgcagacctctctggcttatctcccttcccgctttcagtcccttctctttgcaggcctcattcccacttgttccctggagtaattcacacaggccttccccaccaatcctcctcctccacgcctcagcttacgggccctcctcctggagtgactgggcaggccctgctctgcgccctcgccttctcctaggctaggaccaggattcagcccagggcttcccacagccaagagcctgaggggtggggtgtgcaggaaatgcttaccctcgaggtgtagtagatccgaagcaccggattcccggacaagtcgatcatcttgtgactctcactgcctcggaccacagaacttggggagaaaacaggggaacccacaaggtttcatgaccactaccatgcatccaatcctcatgttaacacctattgtacagatggaaaactgggcacggctaaggaccagtatcctgccgaaagccacagttacctatttgggggcagagtcaggattcaaatgccacatttgaaagctcccatgccccttcctataagctgtcacctatatggaatcctagaatacccagccagaagagtcctaagaattgcttaatgcaactgtaaacatgactgaagctttaaagagaggcaggtttgcctggggtctttctacaaagcagagctaaaaaggagcccttccaggatgcctagtgccatcccagacacccttccgtctaggctcagcccaccccactgtaatgtctccaagtggcccaggcccccagaatcgcagcagacctgtggaggtgcagccagtgactggccacatccaaactcatgctgatttggaagaacagcgtggctccagggtacagcagggccaggttgaccaacaggcacatggtggagcagcggtccgtcagcatgtccagcatggccccaaaccgggttcctggaagattaggtgggcaagggctgttatggcacagtggatgcaggacaggtgcccatatttggtttatcactctgacgcagggtgtaaacgaagactggaagtgtccgcctgcctggggaggaacgcaggctagaaaacaggctgtgtgtgaggtcagtgggcaaaggtcaccatggcatgaactgagaaaggcatgagagtggagggaacagggtaggaggagaggaaagctatgtctgcaactcatcaaccccagaaccaagactccagggctagatagagacttgatgcctcaggggaagccttacagttgggtctggagaacagattaaaaaattagtcaaccctccagaagccatcacccttccctctccatcctccctctaagcatgccttctggaaccccaactgcttatgcagggcacacagtaggcctccagtaaacacctgttgaatacactgttttttgttttttgtttttttttttccgagacagagtcttgctctgtcgcccaggctggagtgcaatggcgcaatcttggctcactgcaacctccgcctcccgggttcaagcaattctcctgccttagcctcccgagtagctgggattacaggcacgcgtcaccaagcccgctaatttttgtatttttagtagagacagggtttcaccatgttggccaggctggtctcgaactcctgaactcgtgatccacccacctcggcctcccaaagtgctgggattacaggcgtgagccaccgcccctggcctgaatggacttgtattcagagagacctccagcagcgccaccgccatgtcatgtcttgctaatccacacctctcacaagcagtgagttctcaagagctagcttaaattccttttgctacaaaatcagtccattcttgctgggcgcggcactttgggagcaaggcaggaggatcgcttgaggctaggagctggggaccaatctgggcgacactgcaagacccagtctctacaaaaatttaaaaattagccgggtgtggtggcacgctcctgtagtcccagctagtcaggaggctgaggtgggaggattacttgagcccagaagatgggggctgcagtgagccatgatcgcgccactgcactccagcctaagtgacagagcgagaccctgtctcaaaaacaaaaaaacaaaacacaaaacaaaaagccccaggccatcctgttctgctttttccagagatgggaatgacagccctctgactctgaggtcccgaggaggcaggggaagggaggaggggattgttgaaccccaaggctggctgagaggggtgtctgtcaccttgattaagagcgcgagcagcgtgtccatcgaaagcgtccagcaggccgctgagcaggtagaaggaggaggccgtgagggggcagcagggcatgaagtagaaagaaatgatggcgaagacaatccgggcataaccttggaacgggacgcggggagacagggcaggatcagggagcccgccaaggcccctcgccctctcgttcggcccggggccgtgggcagcactcaccgatgaggttgggcacgaacaggaagatattttcgtctggcatcgcggcgcctcccttgctgccccgggcctgctctggagatgccagtgctgtcccagccccgcagcgcggcctcagcctccggcccggcgcatcggccgcaccacctgcgccctggaccccgccgccccaacctggccccagatgctgaagcccgcagccgtcgggagcatggaccggccccgaggtgcgcgggacgcagggggcgcgcgcagtccgcccttcctacccgcaacctccctcgcctctgccagccccgcaggcgctccgggcctccagctgcggtcgccgctgctccagctgcgcgtggcttccgggaacctcctcctccgcgcccgtcgttgcaaaattggagagaggaaaaagtggcttaaaaaaatagttgcggcccctttaaggcctg

SEQ ID NO: 66 - DNA, 27746 bp, Homo sapiens
tttgggcggcaggatgctggtttatttactgtaggatctccagggccatcaaagccccctcgtgggatagggagactatttacacagccagggaggagggcagccaggaggcagagaccgggtcccgtatttccctctgcccgaatgaggaggggaggggcgtcctgggtcctgcagctgtagtcttggggttcagatggaaacttcatactcccgcgtatcctgaagacagagagatcaggtcagttgttggagtctgataggggtggaagaggcagccgaatgggaggaggggcaacgatcctgggttttaaagtaacattgacctctaggggctggggggccagtgaatgtgtttggttcatcctacggtgtcgtaaaatgacacaaaaatctgaatttctggcttgtcttgaataattggaagatctgccaattgtgcctcagtttcgactatggggtagagccgtattcttgagatggggcacaagtcctccacttagccacagtcctcaccactccctattgtatacacatggcttgctatgctcattgacatggcctctgggggcagctgagtttgaaattcccaagacagagattccagagaccttgcgagaaggttatggagtcctgggagagccaagtggtggctcttcaggggcaggcaaggtgcttaccccagcttcatacagcgggttgctgaagtccgactccacggtgatggggctgtaggagtgggagcccgagaagccgaaaagggactttccctgaagcctgggaaagggagaggacagaggagcttatcaacaggtaagcccctgagctcccctgacccaggctccagtgccaggctcgcaagacgtctgccctggccggcagtccccaagcaggctacttacttggtgtagtagatgtaaacgccactgccgaggacaatgaccaagcctagaggcagcaggatggccagggccaggttccccccttccagctgccgtgatggatctgtggtctgggtcactacaggaggaggagaggccggtgagctgtggctgggcccggtcctgggctctcccagcctcctgccctgggcctcaaaccctgggcttcatccctccaaggcctggcctcctgccccagcctctgccttgccctcccaacctggccagcctgggtctccacctgtgctctcactgaccttccagttttcggttgtccaggagctcctcataggcaactgcagggagaggagggggaggggatggggtctgagccagggaggggaggaggctgggaggggccgggagcccggtggggctgggctggacagcctggttctctctgccctctgctcaacctcaactttctccctttgtggggaagagagaggagtgaccagcacagggcctttgtcctctttctccagacccctaaaaagtcagggttcctggacagtctgagccaaactagaacttgtcagcgatagggaaactgaggcctattcagagcaagggacttccaagccaaggccccctctactacacccctgagccaatcccatgacctcacacgacccagggcttctggacacacccgtgaggacacgaggccacaggaggagaaccgggagctctgtggggtcgcccattggtctcaaatgtgctacctgactctcccagccctgtcacttcccggacactggtgtgcccctcctgccctgtctggccaggcacctttgcagagtgggggctggctggtccactgggaggggtggccgggcacacaggtgatggtgacctcgccgataagctcaaagccctcatagcagaagaagcgcagagactcgcccgcctggtagtggtgcttgtacagcgtctggtagccattctcgggaacccccgggttcaggcacggctcgtacttcactgcggggagcatgccagtcacgtgccagctgcactactgtgcacggggcagacgggctctcccagggctacccagccaccctcccagggtgtgccccagactcacaggcgcatttggggaccctatcgctccacttgggtgtgcctgtgtcccggctgtagcaggtgagcatggctgccccctcgaggctgtaccctggcaggcagcggtactggacgtgggagccaacggggaagccggcgtccgaggcggtgcggtgcccgttggcaatctcgccagggtcagcacaagtcatgactggtggcagaagaacaaggtcagggggagcgagggccttcaaagatcagcctgggcaacacagagagaccccatctctacaaaaaattgaaaaattagccaggagtggtggcgcactcctgtggttccagctactcaggagttggaggcgggatgatcgctcgaacccagcaggtcgaggctgcagtgaatggtgaccacgctactgcactccagcctgggtgacagagtgagacccagtctaaaaaaaataaaagaaaatctcccagaagcttagggctgggagaggcctgagcctcaggctgtttcctctgaacacctctgcacacacacgcacttcccaccaattcctcagaaggaagagagcatgaattggaaaaacttaaaatgcagtgcatctattttcaggccagaatgacaggcttaatttttttcaaaattcaacgtatgttatatttcaggcttcgtttagtaaacagtttgcttggggaaaccccaagcccctatcctggggtgaaattcaaaatatttaaccaccataccagagcatactagccaaatcccagcagggtgagcccaacatggcttgtagtctgtggaacagcagctgccctctttagagggggcccagctctcctgtccccagtattctcattatgcccagcccagttcactcacatacactccctgccttcaggcgtttgagtttacaaccctgttgtgaaggaatcataatcatagccatttcttgtatataagcctgagctacgtaccctgctaaatgttttacaaacaaatataattctttgtgtgtgtgcttgttttttttttttttttttttttttttttttttttttttgagatgggagtctcgctctgtcgcccaggctggagtgcagtggcgcatctcggctcactgcaacctctgccttctggactcaagagattctcctgcctcagcctcccgagtagctgcgattacaggcattcgctaccatgcccagctaatttttgtatttttagtatagacagggtttcgccatgttggccaggctggtctcgaactcctgacctcaggtgatccacccacctcagcctccaccagtgctgggattacaggtgtgagccaccacggctggccccaaatataattctttgttttggagacgagaacttgctctgtcactcaagctggaatgcagtggtgagatcacggctcactgcagcctcaaactcctgggcttaagcaattctcgcaccacagccttctgagtagctgggactacaggcatataccaccatgcctggctatattttttattatttgtagagacagggtctcactatgttgcccaggctgttctcaatctcctgggctcaagtgatcctcccaccttggccttccaaagcactgcaatttcagatgtgagccaccacacctggcacaaacataatatttaatcctgattatcctgagaggccaatgtcactgtcatctcccttggagcccagggctcagggcggtcaaaggacttggcccatggtcattcagccagggagtggcagagccggaatctgcccagggtcacagccatggagcactggacagggactcagatatgtgggtcctggcacaccttcaggctcaatctgctgccttgggcaggttccctcctgagcccgaggcagcggggccagccgaactctcagccccatccaggcctgatatcctgtgaatccttccaggggcgggaagctttgtccagcccaaatctggctacctgaagcttctccccttggtcccaccattgcttccagatgccacatggaactacagccccatgtccttggggctggcttcctaaaatttggagaaagtaaccagctgccattcctttctgctcttcaattttctttttctttctttctttctttcttttttttttttttgagatggagtatcactcccgtggcgcaggatggaatgcaatggcacaatctcagcttactgcaacctccacctcccaggttcaagcgattctccttcctcagcctcctgagtatctgggattacaggcgtatgccaccatgcccagatagttttttatttttagtagagacggggtttcaccatgttggccaggctggtctcgaactccagacctcaggtgatccaccgcacctggccctttctgctcttctaaaagatacacactcccagctcctttaaatgtcacctcctctgtgaaatctcctgccccagccctgagaaaattagcccactgctctccccacagcacttcgccacgcccagggcagcatgcgccctgtgaactttccatctgctcttcacaacctcagtcctacttcgccgatggggaaaccaagcctcagaaatgctaagtgcctcgcccaaagtcacccagtgatcaccaccctgcgtatccctcccagactgcgagctccataagagtatggaggggcttgaacccccttcgcctaaccccaacccagcacggggcttcaatgatggcattcaaataaaccaagtgctctgacaagccttggtcctagcaaagtggctccctacaatttcaactgataggactgcgggattggggcggggcgtaggacaggaaggtggagccaagtgtggacccggggagcccagtgggaacctggtcggagcccttttaggggccaaactcagatgccgcagaggaggggtcaggaggggacggggcggggccgtgagacgaggaaacagggaccgagcccaggtcggtgcaagaaagagggatgcagcccggagaagatgagagggagacccagaggggacagtttcggggaaccgggcggaggagtgagaactaaagggcatgggggcaggccttgaagaagatccaggaaggaccccgagcgaagggatggaacccagaaagcacgggggtcgggacaggacaggccgacgacggggcccacagggaaggggcggggccgaggggacgcgggcggggccggctcactcttttggcaggcgggcggcgcggcgctccaagacaggtcccactggcaagtgagaatgtcggagcctagcagctcgtagccaggctcgcactggtaggtgagcaccgtgccccggatcaggtccccgtgggatgccgttctccagccccactccggaggtggcagctcggggcacgtgtcgttcctcgggacctctgcaggggagggaaggcgagtttggaggctgcgttttaactgcgggctcccttccagcctcggaggctttgctctgtgccccctcccgggatctgtctctctctctctctcttagagacagggtttcctgtcgcccaggctggagtacagtggtacaagcatagctcactgcagcctcaacctcctggcttcaaacgatcctcccgcctcggcctcccaaggccccgggataacaggcgtgagccaccacgaccggccacctcccgggatctctggcctgcccgacccctgcccatcccgggactctatccctcagtacctttgaagtgcaatacgaagccctggcccaggcctggatttgggggcccgggcggtgcctgaaactgcagtgtgaggtcgggcccagaggagagaaggcggcggcgcggctgaggtccccgcagctgggccaagactcgggcgctgggaccgtccccgtcgaacagcgtcagcatgtccccttcccgcacattcaatctgcagggggtgagaccaggcaatggggcggggctgcgactggcccctcccatccagctctgccccatcctcaactctgctcattggtagcccctcctactctccagccccgcccatattctcctatcccaggtctggcgccgcctccgttttgaccaaccatggtttctcctatgctagtgcctcagggttcccctattctatggctcctcccatgtcctactacccaatccctaagcttgcacattactaactccgcccactgtccactccctcctccatcaccatgagatccacagcctagcccaactccagctctggccaatcacagaccaaattcgctaacgccctacacaactctaggccccgcctgagtacctgctttgaagccacgcccacttcagcttctgtgccatctcatgacactctcataccaattcagctcactggattctccccagacctccccaacttgctggtgttaacgcaacagtttgggtctgtgtccgtggaaatagctccaggggaagcctcagaaacctccaaagagtgagaggcaccaggccagagccccttgttcacagtggcccctaaggaaggctgcattgccctatttatttgtccgaggttgcctggctaatatgtgatttgagcccagctctctcacgtctatcctgtacccttagtgcaccagcctatccaccgaattctggatagatacgcaagagccagacaggctcagaatgcaggctactgcattggcataccacactttgctgagcctacacccgtcgcaccctctgcaggacccaaacatacatctcaacttggagcaagatgcgcttctcttcctggacgtgcacgccccacacgcagtcttggcccgggctatagctctggggccagtcgggagagaggaccacgccagctggttccgacagctcccctccacacatggctagggaaaaaggggtgtcaggttcaggacccaggtgggcatgctgtcttcatttctccacagtcctcaccactcgtgatgcgtgcaccacatcacctcgcttgtttcctattacctatgatccacctgtttcttttattcttttattttatttatttatttatttttaaattttttttgagacggagtctctctgtcgcccaggctggagtgcagtggtgcgatcttggttcactgcaagctctgcctccctggttcacgccattctcctgcctcagcctcccgagtagctgggactacaggcgccgccaccacaccctatttttttttcttttttctttttttttttttttgtatttttagtagagacggggttttacggtgttagccagaatggtctcgatctcctgacctcgtgatctgcccgccttggcctcccaaagtgctgggattacaggcgtgagccaccaggtccagcccctatttttatttttttagacagagtctcactctgtcgcccaggctggagtgcagtggcgcaatcccggctcactgcaatctccacctcgcagactcaagcgattctcgtgcctcagcctcccaagtagctgggattacaggcacgcactaccatgcccggctaatttttgtatttttagtagagacggggtttcactctattgaccaggctggtctccaactcctgacctcaggtgatccgcctgcctgagcctcccagagtgttgggattacaggcgtgagacactgctcccggctttatccacctgtttcttttttctttctttctttcttttttgagacggagtttcacacttcttgcccaggctggagtgcagtgctgcgatctcggctcaccgcaacctccgcctcccgggttcaagcgattctcctgcctcagcctcctgagtagctgggattacaggcatgcatcaccatgcccagctaattttgtattttaagtagagacagggtttctccatgttgatcaggctggtctcgaactcccgacctcaggtgatccgcccgcctcagcctcccatagtgctggtattacaggcgtgagccaccgtgcccagccatgatctacctgtttcttgccgcatctaggtcctgttgtgttcaatatccagtcctgctcttaacaaaccctgcccactctccagcctgcccaatctgtgacttaacccaacagcagttctcgctcttgaagacatttgggtttgtgacccctgcattcagtaacaagcccagcagttattcagctaagaaaacagcctctgaagggacagggatttacccaaggcttgggtggatgaagtctggatgtgcagccttcctttctgaacggccttgctgggatccccagttcagggggcaacgtggactgaaggacatgcctgcgacaaggaaggctcacctttgcaggccggctctgtgtcgttccagtggggttctgtgggatccacacattcgatggcattggggggcccagggggctccagggcatatcctgggaggcacgagaaggttgccagtgcccctgggcgatactcagggtccgtggtagtgacatttccatgtgccaggaagggggcgaagcagcgatcctcctcaaaggctgggaaggagtcagtcataacaattaagcattaggacaggcctcaagggatcttaaattggggatgtgggctgaattggggtgttctttggccactcactgggcttttttttttttttaaacagtcttgtgctgtcgcccaggctggagtgcagtggtacaaccttggctcactgcagcctctgacttccaggttcaagcaattctcatgcctcagcctcccaggtagctgggattgcaggcgtgcaccaccatgcccagctattttttttttttttgagatggaatttcacacttgttgcccaggctggagtgcaatggcacaatcttggctcaccgcaacctccgcctcctgggttcaagcgattctcctgcctcctgagtagctgggattataggcatgtgctactacgcctggctaattttttgtatttttagtagagacggggtttctccaggttgatcaggctggtctcaaactcccgacctcaggtgatctgcctgcctcggcctcccaaagtgctgggattacaggcatgagccaccgtgcctggccaatttttgtattcttagtagagacaggggtttcaccatgtcggctaggctggtcttgaactcctggcctcgagtgatctgcctgcctcagcctcccaaaatgctgggattacagacatgagtcactgcgcccagcctgggtttttttttaatttttttagagacagggtctcactctgttgcccaggctggagtgcagtggtgtgatcacagctcattgcagcctagatcttctaggctcaagtgatcctcccacctcagcctctctggtagctgggactacaagcatgcacaccccacccagcagctcattttctgattttttttttttttctgtagagatggagtttcaccatgttacttaggctggtctcgaactcctgacctcaggtgatccgctggcctcggcctcccaaagtgctgggattacaggtatgagccattgccctggcgttggtgggtttttaaaaactgaatgccactgggtttagcattcactctccagactgtcaaaaaaagttctaacactcctcattcacatatttatattgcctccctggcctctggagggaagccactgagctagccaaatcccagccaccattctacagagcggaggtccatagaccaaaaagccacttgctcaaggtcacacaaaagacaatggcaaaagcaggtctcaaacccagatggtttgattcccagccacagatacttggctctggaaacagcagagatagcgggtaaggggaggggtgccttcagagaactggctggtgtaggtgtattgtctcctcagaaataacagttggattctgatcatccatgctgttgctgaaacccaaaatttcagctaatgcaaaaactactcagtttttacttcaagtcagcaaaagtgaacatttgtagagcatttgagtttctgcccacctgatcggatcttagctgcaaaactccctgtaagttaagatttaggtgcctatgataccaatgaggaattcttttttttttttttttttttttttgggatggagtttcgctcttgttgcccaggctggagtgcaatggtgtgatctcggctcactgcaacctctgcctcccaggttcaagtgattctcctgcctcagcctcccgagtagctgggattacaggcacccacaaccacccccggctaatttttgtatttttttagtagagatggggttttaccatgttggccaggctggtctcgaacacctgacctcaggtgatccacccgcctcagcctcccaaagtgctgggattataggcgtgagccaccatacccggccttttttttttttttttgagatttttaattttattttaatattttatttttttattttttgagactgagtctcgctctgtcgcccaggctggagtgcagtggcatgatctcacttcactgcaaactcggcttcccaggttcaagccattctcatgtctcagcctcctgagtagctgggattacaggcacgtactaccacacctggctaatttctgtgtttttagtagaaatggggctttgccatgttgcctaggctggtttcaaactcctgggctcaagtgatccacctgcctcagcctcccaaaatgcggagattacaggcatgagccactgtgcccgggttattttatttatttttaaaaatgaggccagatgcagtggctcacacctgtaatccccccactttgggaggctgaggcaggtgaatcacctgaggtcaggagtttgagaccagcctgaccaccatggtgaaactccgtctctactaaaaacacaaaaattagctgggcgtggtggtacatgcctgtaatcccagctactcagaaggctgaggcaggagaaccacttgaacccggaaggcggaggttgcagtgagccgagattgcgccattgcactccagcctgggtgacaagagcgaaactccatctcaaaaaaaaaaaaaaaaggaaaaaaatgagacagggccttgctctgtcacctaggctggagcgtgcaatggtgggatcacaactcacagcagccttgacctcctgagctcaagcgatcctcctgcctcagcctcccaagcagctgggaccacaagtgtgcaccaccacacctggctaattttttgttttgttttgttttgtagagacaaaggtcttgctatgttgcccaggctggtctccaactcccaggctcaagtgatcctcccatcttaacctcccaaagtgctgggattacaggcgttagccattgtgcctggccacagtgaagaatcttaaactcatagaatagcagtggcctacaactctggagtcaggactcacaacttgctattttcggtaaaagatctgtgctgtttgcactttaacactcccagaatctatcccgcaattcatttttgcagatccactgttctatttcactgttacttaacctgcaaggtatcatgtccaaatcctacccatccatcacagccgagtgccaattccatttctcccatgattcatatcaaacactagaccctcctatctctaagcatttcatctttttggtctctctcttgctactgtttatacaactcctctgtttcagccacaatgaaattctgtttcccagacataccaggcatttccctacttgctgtttctcaaagttcctctctttccttttcttttcttttcttctttttttttgacagggtcttgctctgttgcccaggctggagcacagtggtgcaatcatagctcactgcaacctctggggttcaagtggggttcaagtgatcctcccacctcaaccttccatgtagctgggactagaggtgtgtgccaccacacctggataattattacttttttttaatttgtagacacaggatctcactatgttgctcagactggttctcaaactcctggcctcaaacaatcatcccaccttggcctcccaaagtactgggattagagacacgagtcaccacaactggcctcaatcttcctcttttaaaatatcctctgttggctgggcagggtggctcacgcctgtaatcctagcactttgagaggccgaggtgggaggatcacttcagctcagtagttggagaccagcctgggcaacatagtgagatgctgtctctacaaaaaatgtaaaaattacccaggcatggtgccgaacgcttgtggtcccagctactagggaggctgaggcaggaggatcacttgagcccaggaggttgaggttgcagtgaaccatgatcgggccaccgcactacggcctgggcgacaaagcaagacctatttcaataataataataataataataaaataccctctatcctttaaggccaaggtgaaatgcctcttcctccatgatcacttccttgtttctaccccttcacattcattcctcttcttctggtaacggcatcccaattttaattttgggacgcaggccttccccactcccagtccactaggttaagttggagcccaccagggaaggccacgtgaggcagattagccaatcccaatactcccttctcctagctcagtgattggctcaggctaaggccaaccaggatcttagtcaggtcaatgaacgcctctcctggcatttttgctgagctctcaggaaatatatgagtgttctctctgatgaggttactcggttggtggtatgggctggaggaggtggcttacacctgtaatcctggcactttgggagtcccacatgggcgaatcacttgagcccaggagttcaagaccagcctgggcaacatggtgaaaccccgtctctactaaaaacccaaaaattagctgggcgtggtgatgcatgcctgtaatcccagctactcgggaggctaaggaatgagaatcgcttgaacctggaggaggggggctgcagtgagctgagatcgcgccactgcactccagcctgggcgacagagaggaactctgtctcaaaataaataaataaataaaaataaataaaaactaaaaactgtcaggcgcagtggctcacgcctgtaatcccaacactttgggaggcggaggcgggcagatcacctgagttcgggagttccagaccagcctgaccaacgtggagaaaccccatttttactaaaaatacaaaattagctgggcatggtggcgcatgcctgtaatcccagctactcgggaggctgaggcaggaaaatcgcttgaacccgggaggcagaggttgcggtgagccgagatcatgacattgcaccccagcctgggcaacaagagcaaaactccgtctcaaaataaataaaggccgggcgcggtggctcactcctgtaatcccagcactttgggcggccgaggcaggcggatcacaaggtcaggagatcgagtccatcttggctaacacggtgaaaccccgtctctactaaaaatacaaaaaaattagtcgggcgcggtggcgggtgcctgtagccccagctactcgggaggctgaggcaggagaatggcgtgaacccggaaggcggagcttgcagtgagccaagatggcgccactgcattccagcctgggtgacagagcgagactcgtctcaaaaaataaataaataaataaataaaataaaaattaagttggtggtatgtaagtcggcagctatgtccatcacacagggaaagtgcctaaggatgaagccagcacagaggaaagaaccgagatactgagataactggtctctgggctatgtacctggatccagacattcatgaagcttaaacagagaaggctgcctgggggaaggagaaggggtccctagaagagatccttgcagttttggggcagggaagcgagtcacgtttcaaggaacccagcacggagatgaacaggcatagagtttgtgcttccgactatgcttggtgtcaggaagaggggaaggtgtggcggttggggtcctgtgggggagtgggtcacttaccttcaaatcgaaggcttaacagcaggggattggcaggtgtctctgacagcagctccacgtagagggactgggcgtcactgatgagaccccgctcggggacatcgtccatgtccgaatcatagatcacgggggatagggggctgccccctgagcgcaccatcagcctgggatggacagaaacgtgaccaggagctcaatctccctcacaagctgcctcaccccttgcctgctttcctaacttatttttatagctgttatcatcacacataactatatgccacgcactcttctaagcccttacacattctatctcatttaattttcacaagaactcttgagtcagacactattattatcctttattttatagatgaggatattagggcatagaaagatcaagtaacctgtccaaggtcacagagcaagtagtggcagggctgagataccaagttgctaggtaaaggatgataatgatgatgaagatagcagatgcttgaccaggcatggtggctcagctcacacctgtcatcccagcactttgggaagccaagacgggtggatcacctgaagtcaaggagttcaagaccaggctggccaacatggtaaaaccccatgtttactaaaaatacaaaaattagccaggcatggtggtgcatgcctataatcccagctactcaggaggctgaggcaggagaattgcttgcatctgggaggtggaggttgcagtgagctgaatccgtgccactgcactccagcctgggtgacagagcgaaagtctgtctccaaaaataaataaatagataaataaggccaggtgcagtggttcatgcctgtaatcctagcactttgggaggctgaggtgggtggatcacgaggtcaggagatcgagaccatcctggctaacacggtgaaaccccaactctactaaaaaaaaaagtacaaaaaattagccggacgtggtggcacacgcttgtagtcccagctactcgggaggctaaggcaggagaatagcttgagcctgggagacagaggttgtagtgagccgagatcgcaccactgcactccagcctgggcgacagggtgagactccatcttaaaaaaaaaaaaaaaagaggatagcagacacttttatagtgcttattgtcccaggtgccattctaaggactttatataatttcagcacttatcctcacagaaacctgaagagggaagtattgttatctccattctacagatgaggaaactgaggcacaaagaagttaagtgatttgtctaaggtttcacagctacacttcctaagaaagtcttaggactggctgggtgtggtggctcacgcctataattccagcactttgggaggccaaggtgggcagatcacctgaggttgggagtttgagaccagcctgaccaacatggagaaactccatctctactaaaaatgcaaaattagctgggcatggtggtgcatgcctgtaatcccaactaatcaggaggctgaggcaggagaatcacttgaacccgggaggcagaggttgcggtaagccaagactgcggcactgcactccagcctgggcaacaagagtgaaactctgtctcaaaaaaagaaaaaaaaaaaaaaaaaggcttaggactaagctgtgatgcatatctcaaccaggatccaccccagctgtgtccaagtccccacttagcctccctacttccctgaggtggggacttctttttttttttttgagacggagtctcattctgtctcccaggatggagtgcagtggtgcgatcttggctcactgcaagctctgcctcccgggttcacgccattctcctgcctcagcctcccgagtagctgggactacaggtgcccaccaccatgcccggctaattttttttttttttttttgtatttttagtagagatggggtttcaccgtgttagccaggatggactcgatctcctgaccttgtgatccgcctgcttcggcctcccaaagtactgggattacaggcatgagccaccatgcccggccaaggtggggacttctgacccaagacccagacccttaccggtcattgtcctcatccagcgagaccctttcaaagtgcaggtgcagccggcgcccctcagctgcttcaatgacccaacggcaggtgaggttgggccctacggctcccccaggctctggggacacgatgcggcccagggtggcattgtggatggtgccaccacaggatgctgtgggcagaggaggggtacgttaaggccagcctgaggtgaactgtccttctcctcggggcctcggcccgttttcagaactgttgcattcacacatttggctgggacccggcccagggctggcctctgtcccatggagtcactccagaggatgggaccttctccaggcatgagccaggaaagaaaccagccccggtacgggagaaccccaggattgacacctcctaggatggagacaccactaaaatgaagactctccaactgcggatactctaggatggggagttacaaggatccctaaaattcaaagcctcagctgggaaatcttcaggacaggactttcagagtgaagacaccacgggatgggaatcccagtaagaggctctctaggatagaagccctctggacatgaaccctaaaaatggcttcctctaggatgaggacgctaccccagaagggacctccagaatggtgactcccaaaataaaatctccagtgggacaccccgagatggagaccacccaaggatggagaaaccccaaggagagagaccctccgcacaaagagctctggctgcagaccccaggatggggactcctcagggtaaacaccccttcagaatgggttttccccaaaggtggacacctggacacccccgagataggaccctcccaatggggttcccagaacagatgccccacccactgtggcaggagactcacccatgcagctgggggtttcaccgttccaggatggccgggtgccattgaggcagatgagggtctcctctccctgcagctggtagcccgaatcacagtgaaaggtggcagtgcccccagggtgcaggtccgtcacactcacgtccccatgggccggccggggagggaagccacagctcaggaggtaggctgcaccagacagacagcgggtagcagggctcactttcccatgccaccctctcatactgatcccccagcacttcccccctctcctttcaggccaaccttccaggggcacacactggctccatactggcgtacataccgagaaataagagctcctcacacaggcaccttgcctcgcgaacaggaaactccaacaccccttatctcccccactcattgtaattcaccctcgttggcccccattttatagatgaggtatctgaggttcaaacaagttattctggaccccgctactcatttgttgtgtgacttcaggcaaatcaatgaactactctgaacttcatccagctgtaataacagtatttgcagagcttgttcagctcccaaagtgagtccacacagagattttgaggtcagcagacaaagattatgtgacctggctaggcatgctggctcacgcctgtaatcccagcacttttggaggccgaggcaggtggatcacgaagtcaggagttcgagaccagcctggccaacatggtaaaaccccgtctctaaaaaatacgaaaattagccaggcgtggtggtgggtgcctgtaatcccagctacttggtaggctgaggcaggagaatcacttgaacccaggaggcagaggttgcagtgagccgagatcgtcccattgcactccagcctgggcgacaagagcaaaactctgtctcaaaaaaaaaaagattatgtgacctgttttgcaggtgtgaacactgaggctccaagttattaaatgtctcttttgatttttcttccctccacacacacagcctttcttccaccaaggtgccctgtggtataccctcagctcctcagcttccatccagaagaaccacttgaaacttctttttttttttttttttttttttttttttttgagatagggtctcactgtgttgcccaggctggagtgcagtggtgtgatcatagctcactggaaccttgaactcctggcctcaagcaatcctcctgacccagcctcccaagtagctgggactacaggtttgtgccaccatgccccgctaatttttaaattttttgtagagatgacatctcagtatgttgcccaggctggtcttgaactcctggcctcaagcaaacatgaaacttgttgaggaaatttgactattttgtctttttgtttttgtttttgtttttgaggagaagtctcactctgttgcccaggctggagtgcattggcgcaatctcggctcactgcaacctccgtctcccgggttcaagcggttctcctgcctcagcctcccaagtagctgggattacaggtgtgtgcgaccatgcctagctaatttttgtatttttagtagagatgggattttaccatgttggccagggtggtctcgaactcctgatctcttcagacctcctgacttcactttcactgggggattcatttacaggccactgagtattaagatctttaaagacaaaatagtctttaaaggcacagtggctcacgcctgtaatcctggcactttgggaggctgaggcgggcggatcacctgaggtcaggaaaaagacccaggccttgtcctcaggagtccattgtctactgagatgaacataagaacaaccttctagaacaaagtggtttcaataaatggtagctttgggaatggctgcccatgcccaacagaatcaagtctgaatgctttagtttgacattcaagccccttccatagttaaatgcagcccagcacattccaggttcagggttgatctcccaagaccgatatagcctacacaacacagttttgtgactccttaattttccacctccatattttcgcttgtgctctccccctactttctcatcttttaagagatcagactggggggcttatgtaccacctcttccaggaagccttcctgactctacatctctccaacagttacttgttctcttacctgtacacagtcctgcatgcatgattttgtcatcacattaaccattgtctttttttttttttttttttttttttgagagggtctcactctgtcacccagtctggagtgcagtggcttgatctcagctcattgcaacttttacctcccgggttcaagtaattctcctccctcagcctcccaagtagctgggattataggcgtgtgccacgactcctggctaattttggtatttttattattatttattttattattattattttttgagacggagtattgctctgtcacccaggctggagtgcagtgacacgatcttggctcactgcaacctccgtctcccaggttcaagcaattctccggcctcagcctcctgagtagctgggattacaggcatgtgccaccatgcccagctaatttctgtatttttagtagagacggtgtttcaccatgttggtcaggctggtctcgaactcctgacctcgtgatctgcccgcctcggcctcccaaagtgctgtgattacaggcgtgaaccactgtgctggtattttcagtacagacagtgtttcactatgttggccaggctggtcttgaactcctgacctcaggtgatccacctaccttggcctcccaaagtgctgggattacaggcgtgagccaccatacctggcctaaccactgtctacactggcccaagccttatttattttgtgtcctaaaaggctagtctatgaggtcaggagttccagaccagcctggccaatatggtgaaaccctgtctctaataaaaatacaaaaaattagctgggcatggtggcacacgcctataatcccagctactcaggaggctgagacaggagaatcgcttgaaccaagggggcggaggttgcagggagctgagattgtgccattgcactccagcctgggcagcagagtgagactccgtctcaaaaaaaaaaaagggctagcctggctgatcaatgggtgcagccaagaggcagcatggatcggtgcaaagaccactggatttgtcatcaggcagacctgagttccagttctagctccagaacttactaactacatgcctttgagcaggtgacttcatctctaggggcctctcacctattaacggcaataataattcctatcagggaagattggcctgaaaattaaataaaagaaacacgcaaagcacctggcacatagaagctgctgagaaaacgttaatcacccacccctcagcctcaattaatgaatgactgggagccagggactcggggatctgttgtctggctgcaataaacgtgcagatggttgagcaatctacataacctttgagtcttttccttcctttgagagatagaactgacaatggccactctcagggtttctgtgagaagcaaatgaaactaaggttggtgaaagggctttgtaatgggaaagtttgctgaacttggggtgaggggtgaaggagactttggcttttcagagaaactaatgaggccactctggaccagaggccccagctagtgcaggttgggaagggctgaaacagggccttggtcccaaaggtacccagtgcagctgcgaagcagggaagactgagcaatgaaggccaatttgtgcaatagtcctgcttccccaaatgttccacttagcctaaggagtcctattttcagtgccctggggaagtggctgcttaaaggagccagtggggagccatatcttcagatttcacaatatctgaaatccagcacttggcccaggccctccaggaatgctcttgctccccaataaccaggtccctactgccaaatacacgtcccccagcttgctggcccccgatgaataggcacctttgctatgcacacatgagcccctaaggcaggtcctgagcagaggcctcaaaagaggctggagaggacatgagaataggattcagggtgtaccctgcatgaggcacacaaggcatctgcggtcagcagagctttcaaggagggcagagtgcgtgacaccagccaaggccatgcggtgatgtgaagggggcattggcccgacacacagttctctctgtctccatgaagcataggaagacagtggggtctggaacagggcactggctgggcccctttcctcatgcacacatgtctgctagaacacacccttgtactgtgggaaggttcccgcacacacaggtaagcatggatgtacacacatgtgcaggtcatctgtcataggtcctaacaaatgcagtcgtgcgtgaatacagcccccctttcctgcccccagaagtcagaaggatctttaaattgcaaatctgaggctttcactttcctgcttaaaacatttcaggccaggcaccatggctcacgcctgtaatctcagcactttgggaggtcaaggcaggaggatttcctgaggtcgggagttcgagaccagcctgaccaacatggagaaaccccgtctctactaaaaatacaaagttagccgggagtggtggggcatgcttgtaatcccagctactcaggaggctgaggcaggagaatcgcttgaacccgggaggcagaggctgcggtgagccaagattgcgccattgcattccagcctggccaacaagagcaaaactccatctcaaataaataaataaataaataaataaaattcaaattaggaggcctggcgtggtggctcatgcctgtaatcccagcactttgggaggccaaggcgggtggatcacttgaggtcaggagttcgagaccagcctggccaacatggtgaaaccccatctctactaaaaatacaaaaattagccaggcgtagtggcaggtgcctgtaatcccagatactggggaggctgagacaggagaatcatctgaagctaggaggcagaggttgcagtgagctgaggtcatcaccactgcactccagcctgggcaacaaagtgagactctgtctcaaaaaaaaaaaaaaaaaaattcaaatatctgcctgtcacacctgcaggttgaagtagtctggactgcttactgaagcagataaggctctttatggtctgaatctgacctgcctcccagcctggtctctggcccatttccccttcacccgcttctgtgctttgaaagtaatagcagtgactgacagttttgagctctcactgtgtaccacacgctgtttgtgtttttgtttgtttgtttttgagacagagtttcacttttgtcacctagcctggagtacaatggcgcaatctcagctcaatgcaacctccgcctcctgggttcaaacaattctcttgcctcagcctcccaagtaactgggattacaggtgcttgccaccatgcctggctaatttttgtaattttagtagagatggggtttcaccatgttggccaggcaggtcttgaactcctgacctcaggtgatccaccagccttggcctcccaaagtgctgagattataggcgtgagccaccacgccaggccacacactgttttaaacacttgacatgtattaattcatttgatcttccccataatactaagtattgtgatccctatttttcagatgagatcatgaggcacagaaaagttaagtaacttgtcccaggtcacacagctaggacaattctatcttccatgctgaattccttcacctcatctgggggtcatgtcttctctctctgggtcttggagtgtgctttttcatccacttagccatctgcctccctccttctctccctccctcccaccctttccctggcgaatttatccttcaggtctcagcttagtcatcatctcctccaagaagatgtccccatattccttgggagaaatttaggtcccttggctatgtgctgcccccgctggtgtttctgccatcatattccttatctccttgaattataaccatcctgattactcatctgtcttcctacctagattctgagctcgttgaagccagatttacacctggtttgttcattcctccttcaaggctaacacagggcctggtatgaagcaagcacttgataaacatttgttggattcaatggatgaattgtccctcggatgtgtgcacagatctgtgagtgtgtgagataagtatgcatgggtctcctctgagggccctgccccccagggtcgcagtcaggaggaaaagcccccttcggcaccctgtgcttcgatggttcttaaagatgtcccctctataggccgggcacagtggctcttgcctgtaatcccagcactttgggaggctgaggcaggtggatcacaaagtcaggagatcgagaccatcctggctaacgcggtgaaatcccatctctactaaaaatacaaaaaattagctgggcatggtggcgggcgtctgtagtcccagctacttgagaggctgaggcaggagaatggcgtgaacctgggaggcagagcttgcagtgagctgagatcacgccactgacctccagtctgggcgacagagcaagactctgtctcaaaaaaaaaaaaaaaaaaaaagatgtccagtgtatgcagtatggcccctgcccttccagcagcaccctcaaactcctcaccctgatagtggatcctgaagccaccgccccttgggacccgtgggctctggaagtgcagaagcagccggttggttgggctccgaaggacttgtccttctccaagcatggatgagttggccaggagtcggggggccaggcctggggatcccccaccagccagcaccaggagctcctcttcctgtgacaggttcagcgtctgcacctagagaagccagacacagacccgccagggcaagtcagccaggtgtttgacttccaaagcccctgtcctgtgcctttgccctgtgtgtagcagcccaaaaggcaccacgctgctgcccaagttgtagaaatctagaagagtttttgaggtcacctgagtcatcagacaggttctttggctcccaggccaaacccgtgcacacccacagcccagaggaaaaggcttggaagctgcacagtcacatgctttggtccagttacctggatctcaatgccgtagccagggtagacatggatgctgtaagtgcagtccaggagccccagggtgcggctgacggggctccccagatctggagactccacatacccttcgccctcggagatgttgttattacacagaactgaggagatacaaatggctgggatggaaggaatgcctgtgcttttgccctcccagccaagcaactctggccttcatctcccttctccttagcacttctcatcatctttttgttttgtttgagacagggtctcgctctgtcacccaggctggagtgcagtggtgcaatcatggctcactgcagtctcaaattcctgggctcaagtgatcctccctcctcagcctcccgagtagctgggcccacaggtgcacatcaccatggtgagacaatttttaaaactttttgtagaaatggggtcttgccacatttcccaggctggactcaaactcctggcctcaagcgatcctcctgccttggcctcccaaatcactgggattacagctgtgcgctgctgtgcccccctcaccatcttttatttttttatttttatttttttaagatggagttttgctcttgttgcctaggctagagtgcaatggctggatctcagctcaccacaacctccacctcccgggttcaagcaattctcctgcctcagccttctgagtagctgggattacaggcatgcgccaccacgcctggctaattttgtatttttagtagagacagggtttctccatgttgctcaggctggtctcgaactcccgacctcaggtgatctgcccgcctggcctcccaaagtgctgggattacaggctagagccaccatgtccatcactatctttaagcaatgctccctctcccacctgagccagaactccctttcccaactgttatatagctgaaacaattggaacactgcctggtacatagtaagggtacagaaatgctacctttgttattattattctcccatctgtacccaggactccttccacagttcccagcagcctctctcccatccatccccagcgtgtacctctccggtcctcccacccccatccccttgctgtcgcctcacctgggctggtcaccgtagtggtaacagttgtcgtggtgatgatggtggtcgtcgtctcctcctctcctccctcaggcccaaggggaggccctggggaggcagggctgggtgggggtggggctgtggttcctgggggcggggtcagcagttctggcgcagtggggcctgcccccctgaccccgttaggggtgacggctgttgtcagaggccctgtccccggctcagtggcccgtggcagggagggcactgcgagagtctggccggccggaggggtggctagcgtggggtcccgatcagatcctgggacagtgcagggaatatcagagcacaggaggagcacatggaggaccttgggtggggagcagggctgagggaagctaggggttcccctgccataccacaaaagcctcccgcacaaggtacagcaccccccacctttcccttccccaccccagcccctacctcctcccaaggcttccacagcctgagtcccccctctttctcttctggtcccttctctccacccagccccttccaccctgatactcctctccctgagcctctctctctgcctcctcactcagatcacgttctctctctggttatctcctctctcctctgtctcattctctctcgaactctttatttccccatttccctgtttagtattctgattgcactctgatttcatgattcgagatccactagtttttgtgtttcattctctctgtctctgtcttccaccatttctctgagtctggttctctgaatttccatctctgtttctatgtgtctgtttttctgtctgactgtcacctaatcattctgtctctgtctctctggttctgtctgtgcccaggtttgactttctctgacagtctcgttctgtgttccctgaatctcacaggaatgcaggctctttcctctgcagtctctctctgcctgctcttctctagcctggctccccatctccctgagcccatatccctccctctgcctctaggccactcctgccactctgggggcctcacctggcaggtagcccatctctgggcccctcctcagcagggccccatgaagcagttcagccagggcctcagaggccaccgtgggggtctcacttccaggctctggcaatatctcctcctccttcaggggcagacctaggaggtgaagttgtgtgagcttctccacttccccacaccccttccttctccagagagatattttctagaactcttcctccctcctccatcagctgggcctgcaggggctcagatggtcccaggctcgactgagggccaagatcggaggaggggctcccagctgccctcatactcccactcccacacctcttctctcccctcccctctcccttctccctgggctgtgtgggccttcattgaacaccttagctcttatggaccctggacagcgccagcaaggcagaggggtcgccggtgctgccttccctttcacctcagtggtgatctccccccaaccctggggctctgcagaggatctggccgcacctcccagcccttgcttccgcagtgcctggctttctctctgggtttctgtctctgcagtgtggctgtcttttctctctctctctctctctctctcccccccaccctctctctctctggtcctctgcagtctctgcctccttccctggagtctggctgggggtcagagtgggggactgaaaatctggtctttgagccctgcctctgctcatctgtctttgtccattcatccaagaacagttgtgtgtacagcgcctggcatctctctcagcacctccatctcccacccaggtccctccatgcttctgccgcctccgcagacatccccccaactttcccagccctccttcttggatctagcccctgagacactgctaaaagcttctctcattcatttctctgccttctcaatattgagggttaaggggcttcgggttcaagcctgaaagctctggcttgccccttccccatcagctgtgcctctcccctcccccatgtgctcggaagacccaggatattaagagaaaggagggtggaggaccccgctggacgccttcctggggcccacccccacagtctcatgtccttaccctggatccagggacagctcagcagaattaggaacagcagctggggaggcggcgggtgctgggccctgggagtccccatggcgactcaccccgatctctctcctctgtgcctctctaagtaatctggctgccacctttcctccgtctccgtttatctttccctttaattgttttttttttttttttttttttcctcgtaggagtcagcaaagaaagacaatttctctgccccttgggatggaggggcagaattgggctaggggtcgcctggagcccacccccctttgctcagtctcctctgtcctcttctcg

SEQ ID NO: 67 - DNA, 5231 bp, Homo sapiens
tgaggtgggagagagaagcagagcgagagagaggaggctgctggaaggagaaagaagagggtgaggaggcgacagagggagaggaggaagaagaggtagaaggagagagaaaggggagagaaaggagagaggagggttggaggtgcatgaaggaggggagagggagcttcagcgtggagagaggaccgcggaaggagagagagacagcccagagtggaatgtggaagggaaacagtccagcggggagccagggggcagccatggaagggacaggtggggagctggggggacaggggaactggggtccggaggacgccccaggcctcttggccagggcctccctgatcatgctcccgtggccactacccctggcctcctcggccctcaccttgctcttcggggccctcacttccctgttcctctggtactgctaccgcctgggctcccaagacatgcaggccctaggggctgggagccgagctgggggtgttcgtggtgggcctgtgggatgctcggaggccggcgggccaagcccagggggtcctggggatcccggggaaggacctaggacggaaggcctagtgagccggcggcttcgggcctacgcaaggcgctactcctgggctgggatgggtagagtgaggcgggcagctcagggtggcccaggccctgggagagggccaggggtcctaggtattcagcgcccaggcctgcttttcctaccagacctgccttcagccccctttgtgccgcgggacgcccagcggcacgacgtggagctcctggagagcagcttccctgccattttgcgggacttcggggctgtgagctgggacttctcagggactacccctccgcctcggggctggtccccacctctggcccccgggtgctaccagctcctgctgtaccaagcaggccggtgccaacccagcaactgccgccggtgcccgggggcctatcgggcactgagggggcttcgaagctttatgagtgccaacaccttcggcaatgccggcttttccgttctcctgcctggggcccggctcgagggccgctgtgggcccaccaatgcccgggtcagatgccatctgggtaagtagctgccgcctactgacaacctccttgcctcgatgatttcccccccagacccttctctccgccagagccgtctgctgtctggttctcattgtgcctctcttcttccatggctccctgttgccacccacagcagcatttcctcagcctcggttatctgcacaccaccttcataagctttgccgtggtcattcccatctgtactgcgtttcttcaccttggctctccccccgaccttttgttctacgtatttaaaagaaatatttatagcactatcagtattacttgccctaaatagtactcataaaaagcctggacaacacagtgagaccttgtctctacaaataataaaacaattagccgggcgcggtggcccatgcctatggtcccagctactggagagggtgaggtgggaggttcactggagctcagcagtttgaggctgcagtgagctgagattgtgctactgcactccagcctgggtgacaagaaagtactcataaacacaagctgaaatttaaaaaagaaagctttcaacagtctagaacattctagttaagtgctctagtctctctgatcctgaagcctacacttttttcttttttgaggagtctcgctctgtcgcccaggcgagagtgcagtggcacgatcttggctcactgcaagctccacctcccgggttcataccattctcctgcctcagcctcccgagtatctgggactacaggcacctgccactacacctggctaatttttttttattttgtatttttagtgaagacagggtttcaccatgttagccaggatggtctccatctcctgacctcgtgatcaatccgcctcggcctcccaaagtgctgggattacaggcatgagccaccgtgcctagccctacaccttcttttttaaaagggttggtggggtgtcaaagttacagtagcaccaaactgagattttttctttttcttttttttttttttttgagacagggtctcactctgtcacccaggctggagtgcagtggcacaaacatggctcactacagccttaacctcctgagatcaaaggatcctctcacctcagcctcctgagtagctgggaccacaggtgcccaccaccatgcttggctgattttttaaaaatttacgtaggccaggcgcggtggctcacgcctgtaatcccagcactttgggaggctgaggcaggcggatcacctgaggctgggagttcgagaccagctgaccaacatggagaaatcctgtctctactaaaattacagaaaattagctgggtgtggtgtcgcatgcctgtaatcccagctactcgggaggccgaggcaggagaatcacttgaactcgggaggcggaggttgcagtgagccgagatcacaacattgcactccagcctgggcaacaagagcgaaacttcatctcaaaaacaagaaaaaaaaattgtgtaaagacaggctggacctgaactcctgaactcaagtgatcctcctgccttggcctcccaaagtgctgagattacaggcgtgagccaccgcacctggcactttttgatgtcttaaagactggaagaaaatggaaaaggaaataattttctgttattccatgccatgaccttgttttgcccccaatcatctcctgtgctgccagctggatgtgtcctacacttcagggcacactagcctcaggatcagttcccaatccttcctctcttccctctctctgtgctctaaatcatgaaaaccttctggccaatcctgacagatgccacatgtgctgttcttttcaacctagaatccccttcccccgtaccacctcctgaaaaactcctactcagccttcagtactcaagttttcaagtgccacacttcctctgggttggcttcctgttcccccatcagttgagttggctgctcactttcctcacagcactcagccatgtggtccttgggccaggaacgtctttaatcttatacctctcagtgagacagcgcctatcacacagtaagctcttgagtcaaactgtcgaaagcccaggaggaaaagccatttcctccaggaagccttctcttttctcgaaatgagaggttgctgccaggtgccgtggctcatccctgaaataccagcactttgggaggccaaagcaggaggattgcttgaggccaggagttcaagaccagcactgtctgtataagaataaaataaaataaaataaaataaaataacgggtctggccaggtgcagtggctcacacctgtaatcccagcattttgggaggctgaggtaggcagatcacttgagctcaggggttcgagaccagcctggccaacatggcgaaaccccatctctactaaaaatacaaaaattagccaggcgtggtggcaggcagctgtaatcctagctactcgggaggctgaggcaggagaattgcttgaacctgggaggcggaggttgcagtgagccaagatcatgccactgcactccaacctggcgacagagcaagactacatctcaaaaaaaaaaacaaaacaaaaaattaaccctgcattgtagcacatgcctgtaatcccagcagctactcaggaggctgagacacgagaatcacttgaacctgggaagcagagtgagctgagatcacaccactccactccagcctgggtgagagagtgagactttgtctcaaaaaaaaaaaaaaaaaaaagatgggtcacactacccacagcagcgtttccctaatctcctagcacttccctcctccaggactgtattgtaattatactgtggccactttctggaaagaaaggaggatgaccacaaaacctggcatttaagacacttagagctagttgctaattgactggccaggatgggcccctgggatggaggcaggagtgctggatgcccgcgtctcttcttacaggcctaaagatccctcctggctgtgagctggtggtcggcggtgagccccagtgctgggctgaggggcactgtctactggtggacgactcttttctacacacagtggctcacaatggtaacggggtgcccattctgcaggggggatgagggactcaggagcaaaggagcgttgactagaaggcagcagaatcaggcccaacggacttcctgtcctaccaccaccatcttccagctgcatgaccttgaacaagccgcataacttctccaatgccctaggaccaccaccttcttcatcaagtaactgcaaggattaaatgagataatattacgtacacagaaaagcggttaccagcacaggactctgggttcctgtcctacctcttgcacttgggcaaaggacttaacctccttatgcctctgttgctttgtataaaatagggataattatggtaataccacagtttgttttgatgattaagagttgatacatatcggccgggcatggtggctcacgcctgtaatcccagcactttgggaggctgaggtgggcggatcacctgaggccaggagttcgagaccagcctggccaacatggtgaaaccccgtctctattaaacatacaaagaaattacccaggtgtggtgatgagcacctgaaatcccagctactagggagactgaggcaggagaattgcttgaacctgggaggccaaggttgcagtgagccgaaattgcgccactgcactccagcctggtgacagagcaagactccatctcaggaaaaaaaaaaaaaaaaaaaaaaaagatttgatacatttaaagggttagaacaaggcctgccacttatttactgtttgcttttatggtgtttggtgagtgctctggtgtgcaagtacctaatgtcagtggctctgctgttcctgtcccatgtgccctaggctcccccgaagatgggcctcgagtggtcttcatcgtggacctctggcaccccaacgtggcaggggctgagcgccaggccctcgactttgtcttcgccccagacccttgaaggaaggtgctcccttcacacacccaggctggagagacactgcgctcagggacggcttgatggtagccaggacctcctctctactgcgggggtgggcgggggcggaggatgggaactggctagtgagcactgaaatataaattctgaatcctctcctaa

SEQ ID NO: 68 - DNA, 19883 bp, Homo sapiens
ctcaacttaactttatttcaataatttaatagaaaattaaaataataaataatatgaaacagactgataacgctgagctgggcaggcccaggccagtctagtacaaagttaaggaggtagggaggatggtggggaggagggggcggactaccctgcaggacgcgggaggctgctcagactgtggtgatgtcaggaagggccgcacactttggcatggacgatgcactaaaaaaagagaaagggaattctaaatccctcttaaccagctggagagggaaggacgcagggccagggtggggacaagtgttggcttcggaaggctctgagtggtggggccggaatgtaccatgttgttagcaatggggttgggatgggtggagaagggccaaagtgagctgtgccatgcaatgaagggacagaggaggacccacgacttggccagcagagccggggcaaaagtctgggaaggggagggaaagagagagggactgggtcccaaggcaagaggaaggcagggggagggtcagaggtcagtccttgaagacaatttgttggccatgaggacgctcgtcgtgggtgatatggcgccggacatggatcctgcggacacggtgctctcggttctcttcatcctccccgcggccagccccaccagctccagctgctccccctgtggcctccaggagggctgggtctgggccccggggagtctcgtagatgaggatgttcagggtctcctcgaagatccgggcctctggaaattccacctgcaaaaggccagccggccccagctccttccttctggtgcagtcacgcagggccatccccctgcctagggcccctgcaccaacacacctcctagccctgcagtcaggtccttgggcctggcctggcctctctgccactcctttactcagcaaagtcatacttcaaggctcagctctgaagtcaggcaggcagaattatttgttttctctccttcatctccttccctgcctagcctcttggtatattttttcatttgacaaatactgagtgagtgcactgcaccaggtattgttctaggcactgcaaaaatagcagtgaacaaaacaagagttctgtcctcaggaggttacattctagtgggaggactcagtcatacacttaagaaaatataaactagcctggcgcagtgactcaggcctgtaatcccagcactttgggaggccaaggtgggaggacagcttgaggccaggagtttgagtctagtctgggcaacatggtgtaaccccatctctaccaaaaatacaaaaaattagctaggtgtggtggcccacacctgtgttcccagctactcgggagactgaggtgggaggatcacctgagcatgggaggtggaggttgcagtgagccaagattgtaccactgcactccaacctgggtgacagtgagaccccatctcaaaataaataaataaataaataaaataaaatataaatgcagtcaaatgatgatgtttaggaaacgatataagctgggtgtggtgtctcctgactgtaatcccagcacattgggaggctaaggcaggaacatcgttagagcccaggagttcaagttcaaagccagcctgggcaatgtagcaagacctcatctattaaaaaaaaaaaaagagagagagagagaaagagatacatcaggaaaagagatacatcaggaaaaggggatgtgatagccagagccaggagtgttacaactttaagaaggactccagggaaggcctcactgagaaggtgatatttgaccaaaggagtgggggaggggacaaggcacacagagcagaaagagcagcctggggagggccagggccagcgtgagagctgtgggtcaggagtgcacccagtgtcttactggaagatcaaaagggaggccaatgcaattgaggcagagatgagagggaatggaaagggatgaagtcgaagaggtgactggggtgttcccttgtgtggccttggaagcatctaacacagctcttagcaaactgtttttttaattttttatttttattttttattttttcctgagacagagtcttgctctgtcacccaggctggagcgcaatggcacaatctcagctcactgcaacctccacttcccaagttcaagcgattttcctgcttcaacctcccggagtagctgggattacaggcatgtgccattatgcccagctaatttttggatttttagtagagacagggtttcaccatgttgtacaggctggtctcgaactcctgacctcgtgatctgcccgcctcagcctcccaaagtgctgggattacaggtgtgagccaccatgcccggccttttttttttttttttaatcgttgtttgtttgtttctaagacaagatctcactctgttgcctaggctggagtgcagtggtgtgatcatgtatccctgcagcctcaacctcccgggctcaagtgatcctcccacctcagcttcctgagtacctgggtgtaccactatgtccagttaatttttttttattttttgtagagatggggtcttgctgtgttgcccaggctggcctcaaactcctggccttaatggtcccctgcctcagcctcctaaagtattgggattacaggtgtgagccatgcactctaattattggtttatcttcctatcttcccaatcagaggatgtttcttggaagctgggtcactgattcattcattcattcattcaataaatgtttcctagcttccactgtgtgaaaagggcccagctaatgggagataggaaagaaaaagacatggccctgccctcaaggaactaacacctcgctgctgatgcaaaccccctcccctccaccacacatgataaaacactgtctttagctatgaagggagtgtgaccaactttggggttgctggattgaaagttcatgagtgaaggtgacccaaagaaagtgatgcttagcttgagtcttaagattaagtacaagttcattaggcagatagaaggaaagaattccaagaggcaacagtgtgtgcagaggtaagaggtaagaaatagcactgagtgcttagagacttgtgatgactgtggtgtacctgaggcatgtggctcatagtaagctcggaagggaccagatgaggaagggcttgtattttgctcagcacttcattccccttgatttccagcccggtacagtacttagcacagagcaggggcttggggaatatcttgatgattgccacattaatgactcaggatctacaaactcagaggatgttctaagagacatctgattctgaggttttaagaatctatttttggcaatgggcctttctgagtttcccttttttttttttttaattagagttagggctcactctgtctcctaggatggagtgcagtggcatgatcatagctccctgctgcctcaaattcctgggctagggcgggcccggtggctcacacctataatccaagcactttgggaggccgaggagggcagatcacttgaggtcaggggttcaataccagcctgaccaacatggcgaagtctctactaaagagacttctctactacatttagtctctactaaaaaatacaaaaattagccgggcatggaggcgggtgcctgtagtgccagctacttgggaggctgaggcaggagaatcacttgaatctgggaggcagaggttaagtgagctgagatcacaccattgcactgcagcttgggcaacagagtgagactctgtctaaaaaaaaaaaaaaaaaaataggctgggggcagtggctcacgcttgtaatcccagcactttgggaggctgaggtgggtggatcacgaggtcaagagattgagaccatcctggccaacatggtgaaaccccgtttctactaaaaatacaaaaattagctgggcatggtggcacgtgcctgtagtcctagctactggggaggctgaggcagaagaatcgcttgaacctgggaggtagaggttgcggtgagcggagattgtgccactgcactacagcctggtgacacaacgagactccatctcaaataataataataataataataaataaataaattactgggctcaagcaatcctcctgccttagcttcctgagtagctgggattacaggtgcatgccatcatgtcaccaagccaccacacctggctaaattttttgacttcttacagagatcaggtcccacgatgttgcccaggctggtctcgaactcctgggctcaagtgatcctcctgccttggcctcccagagtcctggggttacaggcgtaagccactatgcctcaccccttctgagtttctaatggcaactatggaccccctatacagaaaaatgcatacacccccatttcaggagttgcaaacagccttgaaacccatccaacaggcctaggctaagcaccctgctctaacccgtgacccccatttcacagagaaacagagacccacagggatagggtggcttgcccactgttgtgcaccccagaccccaggatctggctcctgcctcctggtggtgggctccttcccctgccaacctgcttttgtccagggtcctggtcctggccacccccagcccccaacataggctctggagcccctctgaccttggtctgcttcttctccgtagcatagacaatggaggtgcagcacacctcggcgattttgcggccctgcccgtagaaagaccagcagcagatctcgtcccccaggacatccttgaggaagagtagccgcccgtggaagcgcagggccagcttgtcgaacagctcgatgttcttaagtaggttgtcatctgaagtgctggggaccaggggaccaggaggcctcagcgcagttggcacccctccctctgtacccccagaagacgggcctggatgcattcccagtcctctgctcctgcccagggctttggtgctcaacagagagcctcctccacccctggggccaggctaaacgggtctcagaagggaagccacatgcgctgagcaaatcccagcacagcacagcacagcagctccagtgagggaccgggagccaggccacctccccgggggtcctggtgtccccattttttaactgggtgacactaggcaagttacttcacctcttggtgtcccgacctcctcatctgtaaaatggagctcacaacagtactgacctcaagggggaggactctgccagttcctagaatgagagcacttgggataggctcgccactatcactttgtcctcacccaaacccatttactgatgactgagctgaagctgagaagcagaaaggacctgcctagagcgtcaggggtaagaggcgaagccgaatctgcgagcaggcacagatgttcttgtaggccccccgtgtggccgtggccctcgccttgggcagaagcagggctgtgctgcatcccagggtcccgcccagtgccccgcaccccggcggtcacctggtgtaggagtacttgttgttactgcggttgtgcaggagcttcaccacgggctggcgggggagagaggatggacgagaggggtgaggctgcagggagaggcccccccagtgagcctccaccctgcagggcttgggggcctcaccttggaggtgctggccaggagctgctgctcctcccggggagatgtcaccatggggatgaggcacagcggggacagcgtctcccttttttgctggggaagaagcggaaggtggttaacagcacaaccaaaggccacgtactcccccacttaaaagccttcaaaagctggttgggaacaactccagactcctcagtggtccgcagggctctgcaggctccaagctccgccagcctctctgccactctccctttgcttgctgggccttggtcccacggacaccttgctgcttcacacatccagcttgtgcctgccccggccactggctgtgcccctgcccgggatgcttctttgctcagctgtcagcgtggcgtgtccgtcatgccattcagatcgcaggtcacacagtgcctcctcagggccagccctccccagcccccctggctaaaacagcctcctctacatcctgccttttgtgttatcagttttctttttctttttttgagacagagtttcgcttgttgcccaggctggagtgcaatggcgccatctcggctcactgcaacctccacctcccgggttaaagcaattctcctgcctcagcctcctgagtagctgggattacaggcatgtgccaccacacccagctaattttgtatttttagtagagacgaggtttctccatgttggtcaggctggtcatgaactcccgaactcaggtgatcagcccgcctcagcctcccaaagtgctgggattacaggcgtgagccactgcaccaggcctatcagttcattttctacacagcagttagtgtctgactttttctaactttttgtatttgtttatgatctgtctcttcccacctaggaataactacctagtatacagctgatgctctgtatttgttgaatgaatgaacatatttgttgagtgaatgaacttcattgggtgggatgacgttggagaaagaaatctgaagcaaacccatgggcttctttctcttctgtcttctagaatcttcatgccaaaatccctctcacttctcccaaccttgaaaactcaatgcgcaattctaatacaaattccagatttgttttttgcagaaactcataagactctctaaaattaacagagaataataaaagtctacaattactgaggccattttttttttttttttttttttgagacagggtcttgctgtcatccaggctgagtgcagtggcatgaccacagcttacagcagccttgacctcctgggctcaagccatcctcccaaacttaggtcagtttttaaaaataagagcaaagaggaaaggccgaccctgccagatattaagataggctgcaaagccacaacagtgagaacggtatcagttcgggcacagaaacaaaaatacctgagaaacacaacagagcgatcagaaacagaccactgtgtatatgagaattggtatttttaaaaagacaccacaaatgtgcgaggggaattacggagtatgaattcgttatctatcactgtgtaacaaactgcccccaatttaggagcttaaattaacaatatttattacttctgtttctgagggtcaggatctcagcagtggctcggctgggtggctccggcacagggtctcttctgaggctgtggccaagatgtcagtggggctgtgggcatcaaaggcatgaccgcccctagaggatgcactctgagaaagcttgttcatgtggctggcaagttcgcactagctgctggcaggaaacaacaaatccctgccatgtagatctctccacagggttgcttgagtatcctcgcagcatggcaactggcttctccagagcaaataattccagagagggcaaggtggaagcctcattgtcttttttatttttgagatggagtctcactgtgtcgcccaggctggagtgcagtggcgtaatatcggctcactgcaacctccgcctcccaggttcaagtgattttcctgcctcaaccacccaagtagctgggattaccgaggtgtgccatcacgcccagctaatttttgtatttttagtagagacagggtttcaccatgttggccaggctggtctcaaactcccgacctcaggtgatccactcgcctcagcctcccaaagtgctgggattacagacgtgagccacagcgccgggcccctccattgtcttttatgacctaggtctgttggtcctatccagtgaggaaggagatgacacacaggaacgagcaccaggggacgagaatcatcaggctgccttggtggctggctccacaggccaccgctggctctcagtgatttcccccctcccacatgccaaatatactcaccaccttccaggatcccccatcatcccattacagcatcagctcaaagtacagaatctcatcatctcagtcaggtccaggtggggatgtggctctagcatgcagttccgtaactatggctccttaagtgcatttcttttttttttttttttttgaaatggagtcttgctctgtctcccaagctgaagtgcagagccaccaccatctcacctcactgaaaactctgcttcccaggttcaagtgattctcttgcctcagcatcccaagtagctgggactacaggcatgcaccaccatcccagctaattttctttagtagagacgggatttcaccatgttggccaggctcgtctttaactcctgacctcaggtgatccacttgccttggcctcccaaagtgttgggattacaggcgtgagccaccgcatccagcccttaagtgcatttcctatctgcagacctgtgagctaaagagacaggtcatctccacactcccagtgtgcagtggtagaggcaggcacaggataaccagtaaggacattcttgctcaaaagcaggggaagccgggcgtggtagcgtgtgcctgtcatcccagctactcaggaggccaaggtgggaggattacttgagcccaggagttcgagaccagcctgggcaacatagcaagactctgtctcaaaaaaaaaaaaaagtggggcaggggacaggaggcacatataagtcatacatataagtcactggtgtgtggaaattctgtaatccagttggagaaatgctaggaactctttgatgcctactcctgttcatgaatgattctccatggctctccctgagtcgtcccacctcttccatgaaagatgtttgcagctccacagtttcatctgcctgcttcctgcctgtaaaagtttgggtgtgcaaagccgtcttgtccttttgcactggctctgtccctttcagtccaagctggcagtgtctctgccaatataattctcttcataacttattgggtatcttgcatgtcttagggttcactacattagaaaaaagccacacctagaaatctctgcaagtggccaggcacagtggctcacgcctgtaatcccagcactttgggaggccgaggtgggtggatcacctgaggtcaggagtttgagactagcctgaccaacatggtgaaaccccatctctactaaaaatacaaaaattagctgggcgtggtggtgggcacctgtaatcgcagctactcaggaggctgagacaggagaatcacttgaacccaggaggaggaggttgcagtgagctatctcaaaaaaaaaaaaaagaaaagaaaaagaaaaaagaaaatctctgcaaggtaagcccttctctactttgggcttgtgctgagacgctgaaagacaacacctttaaccttctcagaagcgtgattattatttcattcgactggaagtcccctctgaggcatcttgttggtatttctgaggtcttaacaaaggactttttcatcacatcctcagcttgacctttagaccacatttccctgtatttaatgccttgtatttaatctttgcacggaagccatttgttaattttaacatcacttgttatctggaaaggctgggaattttcaaacccaacaatttcaggctctttttcatttaagtgttttttttctttaacttactctctcctcttcagttttactataagcagcaagaagccaggtggcaccttcaacattctgtctggaaagctccttagctagaccatccgttccttaggtatatttcctaccctccacactaatgcaggagacagtgttgctaaactttctgccgctacacaaggatctcctttccatcagtttccaatagcattttcctaactgttcttcaagcccttattgcagctgtcttaaaggtcactggactcttattaacagactttctcaccttttttcttttaatttttttagagacaaggtctcactatattgctcaggctggtctcgaactcctgaactcaagtgatcctcccaccttggcctccaaaagttatggtattacaagtgtgaaccactgtgcccagccaatactttttaacactccttaagcttttactaacaatctcctcaaagtccttccagcttcttcccacttctcagttgtaaagttacttctacatttgaggtttctgttatggcagacccccattccagaaaccaaagtctgttctctgttactgggtaacaaattactacaaactcagcagcttaaaacaacagtccaggtgtggaggctcatgcctgtaatctcagcattttgggaggccaaggctggaggactgcttgaggtcaggagttcgagaccagcctggccgacagagcaagactctgtctctatttaaaaataaataaataaaaataaacattatctcacatagtttctgtgggtcaggaatttgggatgggcttagctgggtggccctggcccagaatctgtcatgaagctgcagtctggattttggctagggctgcagtcatcagaaggtttgcctgggcctagaagctctggttctgagacaggtcaccactatggcggggagtctgtgcttgctgtcggcaggggcttcagttcctcaccaagtggacctctgcttagggatgcctgagtgtcctcacatagcattcacatagagtgagtgatctcaaagagaggcagaagctgtaatgtcttttatgacctagcttcaaagtcacatgctgtcatttctgcaatgtcctattggtcatacacaagggtctccttggtgaggatctgaaaaggtctgccctatttggtgtgggaggggactgaacaagagcctggaaaccaggaggcaagaacccctggtggctgtcttgggtgctggctacctctggactgtttaatacctggcactgggaaaactacctcaccctatggaagacaaaaatgagctaaatcccttcacaatcatatttacaaaagtgagttccatttagattaaaatacccatatatgaaaaaaatccatatttaaaactataggtcaggtatagcggatcacacctgtaatcccagcactttgggaggccgaagtgggcagatcgcttgagctcaggagtttgagaccagcttgaccaacatggcaaaaccccctttctacaaaaaatacaaaaattagacgggtgtggtggctcatgcttgtaatcccagcactttgggagaccaaggcgggcggatcacgaggtcaggagttcgagaccagtctggccaacgtcgtgaaaccccatctctgctaaaatacaaaaattagccaggcatggtggtgcacgcctgtaatcccagctactcaggaggttagggcaggagaatcgcttgaacccgggaggcagaggttgcagtgagccgagatcatgccactgcactccagtctgggcaatagagtgagactccatttagaaaaataaaaaataaaaaatcagccaggtgtcatggtgcacgcctgtaatcgcagctactcgggaggctgagacatgaaaattgtttgaacctgggaggtggaggttgcagtgagccgagatgacaccattgaactctaacctgggtgacagatcaagactctgcctcaaaaaataaaaataaaactacaaagctcacaggtaacagaaaatcagaaaaacatttttaaacaagaccataaggatacagcattaggcaaaaaatggtgaggaattggactacatccaaatcaagaatttttcaagttgacaatggaaagcatgactttacaaataatctcatgtaataatgttgaagagaaaagacttataggtattctgtggcacaaatgtaattactggttcaggtaaggattatcaatttgtgtgtcattgataggtaactgccttaatacagtggccaaataccatatgcattattttatagttagcaacaaggaaatgtaacaatgatagagaaatcaaaccaccatcccctagatccaggggccaattatgaacgtcattaatgacgagtcatattaacaatattatgggttgcttgatgtggcccaacgtgaaatacatacataatattacctaaaatgtattctaaacaaaatgtttaatatcagtcattttatttattttattatttattcatttattttgagacagagtcttgctctgttgaccaggctggagtgcagtggtgcaaccttgactcactgcaacctctgcctcccaggttcatataattcttctgcctcagcctcctgagtaactgggactacaggcacccaccaccactcccagctaatttttgtaattttttatttatttatttatttatttttgagatggagtctcgcactgttgcccaggctggagtgcagtggcacgatctcggctcactgcaacctctgcctccccaggttcaagcgattctcctgcctcagcctcctgagtagctgggattacagatgcccaccaccaggcctggctaatttttttgtatttttagtagatacagggtttcaccatgttggccaggctggtcttgaactcctgaccttgtgatccacctgcctcagcctcccaaagtgctgggattacaggcatgagccaccgcacctggcataatttttgtatttttaatagagatggggtttcaccatgctgaccaggctggtctcaaactcctgacctcaagtgatccacctgccttggcctcccaaagtgctgggattataggcgtgagccaccgtgcccacccaatatcagtcatttaaaatctacagtctggtttacaggaaattaaggataaggctgggtaataaaccaaacgataccgggagtaaacaaccaggcaaagttggaaagcgggtcattgtgcaggacaactggcagtctctttaacaagccagcatcgtgaggaaaaagggaccccttggattgtaataaagtaatgcttatggtattatttggcttatgtaataaagtaatgcttatggtattatttggcttatgtaataaagtaatgcttatggtattattatggtaactgtattaaggcagttacctatcaatgataatccttacctgaaccagtaattacattcgtgccatagaatacctataactcttatcatctcttcaacattattacatgaaactatttgtaaagtcatgctttccattgttaacttgcagataaccagatgcaacgtgaagatctagactggaccctggtttgatgaaccagctgtaaaaacacatttctggaacaactggagaaaccggagtatgccctggactggatattaaataaaaatttattgacatgtaaagatggcaattattaacaacaacaaaaaacagattataaaacatttcatacaacacgattgtattttggcaagcaaatacacacacacacacatactctcacacaggaaacgacctggaagaatatttggtgcttttattttttagattatttgtgtttctgaaatttctacaattaataaatactgctttaaaataatcaatggttatttgtaattttaaaaaatcaaggatttccattcaatgctagatgccacaagtgggtgacattctaagaaaaaatattggcgatatctacattgactagaaatttttatctagaacagactttttcaactgaagttcctcatctgaatctcaaaaaccagcaaatatggccaggcacggtggctcacgcctgaatcccagcactttgggaggccaaggcaggtggatcacttgaggtcaggagttcgagaccagcctggccaacatggcgaaactccatctctaccaaaaatatgataaaattagccaggcattgtagtgcacacatgtagtcccagctacccggaaagctgaggcaggagaatcacttgaaccccagagagggaggttgcagtgaggtaagatcgcgccactgcactccaccctgggcgacagagcaagactccacctcaaaaaaagaaaaacaaaaacaaaaacaaaaaaacagcaaataatttgagtgttttctgaactttgctgagaacagtaggtaaatagtcccatgctacaggcttagaggttaatttgttatgtatataatccatgccctagggaatgtataagacatacccatatgcagtagggcttaattatccctaggaactaaactaaaatatgcaaggatctcctgctaagcaacatgaaaaagaaaaaagcagaaaatctggtaaagaacatgaataagcaattcacaggaagggaaacaaaaaaacactagtgagtatatgaaaagatgctgaacctcattagtaatcagaggcatgcaaatgaaaatgagatcacgctacactcattggattggcaaaattagaaagctggatgatgccatgtcttgatgaggacatgcagaaatgtaatctcttatgcactgctcattatgaggataaagtattataaccattcgggagagcaattagatgatatttactaaaacgccgtttgcaggtgtcctgttatccagcaattctactcccagctacaatgacaggagactggcacagaatcagaagggagcatgtaccaggatgctcatggtgacacggtttgtaggggcaggaactggaaggcaatctaggtctccaacctcaggggaatgtatgaacaaaatatggtgaatgaacaccgcagatttctctgcagctgttagaagcaaagaactagatgtacttggagcagcatgaatagatcttgaaaaaaagtgctgaattaaaaaaacacaatgcaacagaaactgattcacagcttcaatgccatttatggacatttaaaatgcacacatatgcagaacaatgctttagcttttcgagcatatgtatcaaaacattaaaattggatgggtgcccctgggaaaaaggaaagtaggcaggggactgggaatgaagggaaagaaataaaactaaaagacaaaaggtttgcatagaccaatattgatgaagtgccacacactgaggagtgtgctgagctgcgtgaggtgcagagggaacctggaaaggagagagcaggagtatagaaaagtacagctcttgggaggctgaaggtcagatagtcaggtagcctggggtcaaatctgagctctgctgcttcccagctctttcaccttggacacgtcttccaagctccctcgcgtttctttttacgtcaaacaaggatacaagatgtatacacaagcagatagcagaattgctcctgacacacagtgggtacatgatgacattagtaaatttaaaactacaggccgggttttaaaactttagttttaacattagtaaatttaaaactacaggccggtggctcacgcctgtaatcccagcactttggggggccaaggcggatggatcacgtgaggtcaggagttcgacaccagcctaacaaacatggtgaaaccccgtctctactaaaaatacaaaaaagtagcaaagcgtggtagcaggcgcctgtaattctagctacttgggaggctgaggcaggagaattgcttgaacctgggaggcagaggttgcggtgagccaagatcacgccattgcactccagcctgggcgacagagagactctgtctcaaaacaaaacaaaaatgctacagagcaggaatgcacttccaagatctagtacaatgaatgtttctcaaatgcaagtggtaatttattaatgggtcatgaaataagtaatgggtcccaaacagcattaaaaagaaagattatcagagtacatttcactaaaagtatctttttatagaactgttatttcagttatatataatgagtactaaaatgcattttttccctatggcaggcaatcaaaaagtttgaaaaacatggatattgtccaaaggagttctacacctttgggcttcaagaaccagtaagtattccctgagacaaaagttgttcagggaggcaaccttttaatctataaagggcattcaaaaagaaacttttataatcttctcttactattgtaacataaaagaaaggacatttttaacattgtaaaaatagaacagaataacaggctttatgtaaaactcactactttgtacttatttttctcccttccctgtctttcggaacccgaggacagaatcccagaggtaggaatggactcactgaaggtcactgagtcagctgtgacagaggtgacacagaacccttatgtcctggcttcactttccaagctctgctcctcagaaccctaaggggtccacaaaagtggagcctagcaggtggggtctctagaatccccaaccctgttttactgggagtggccctgcttctgtgagatttcatttgaataaagaatttcactgtttaaaaaaaaaaaagaattagaaagctcctggggggcggaagccatgggagaatgctgcctcccaggatagggccagatcgcagaggttattatatttcaatttaaatttagatgtttttccctagtgacatgagggagctatttaggatttctaagcaagagagagaatagatcggggttgtgctgaaagataattactcaggtgcgagtgtaacagctggactggctgcataggaacagtgggaagtagagagcagctatttaaccattgcaaaggtcctggcatgaggctggggtgggggtgctgcctgaggcggcagggatgcagaagatggcacctcaaattctctggggttatggccagccaaagccaggctctccaagccataccccatatctccttttttctgctctaatacctgcttgggcagctctcccaggaacataggcatggggactccgaaggccctcacctgcagcgccagctggcagtcctcaatcaggccctgcaccaggtagtagcgtgcttcgcccagcagctcccccagttctctcgtactctccggcagtggcacagacccatcccgcaggtaattgaggattgtaccaaagtgacggccgctccggtcaatcagcacccaacctagtggggtggggagaggcagggggaaagatggctttgctgcgggacctggagctactaaattaaaaaaaaatttttgtagagatggagtctcactatgttgcccaggctggtcttgaactcctgggctcaagtgatcctcccatctcggcctcccaagtacttggattataggtgtgagccaccaaacctggcctaaattataagaaaaaaggattccagccaggcgcggtggctcatgcctataatcccagcaccttaggaggctgaggcaggcagatcacctgaggtcaggagtttgagactagcaggaccaacacggagaaaccccatctctactaaaaatacaaaattagctgggcttggtggctggtgccagctactcgggggggggcgaggcaggagaatcgcttgaagccgggaggtggagtttgcagtgagccgagatcgcgccattgcactccagcctgggtaataagagggaaactccgtctcaaaacaaaaaaataaaaaaagaaaagtaaagaaaagaaggccgggcacggtgactgacgcctgtaatcccagcactttgggaggccgaggtgggcggatcacctgaggtcaagagttcgagaccagcctgaccaacatggagaaatcccgtctttactaaaaacacaaaattagccgggcatggtggcgcatgcctgtaatcccagctactcaggaggctgaggcaggagaattgcttgaatccgggaggtgggggttgcggtgagccgagatcgtgccattgcactccagcctgggcaacaagagtgaaactccatctcaaaaaaaaagaaaagaaaagaaaagaaaagaaaaaggattccaaagccacaaaaaagtctgaatactgatctgtctcaaacctgtgccacagccaagaaatctctttaaaacatctccagcgagttctcccttaagtttttatacatattcaaccagataattaactcatccatatctggtctacagtcagaaggctctcaccatgagaaagttcttgcagaattaccttatcaataaactgttaacccccgaagttaattctcaccatcctatttaattaaaatgtctacctccccccgtccagttcactgccattttaacttttatattcttcatagagcttactatcaaaaaaagaaaaaagaaagaacttactactatctgcaattgcatatgcatatacattttgtttacttgcttattggtcttctgatctcccacttccctaaaaaaagggaatttccataattttgtcaggttcatttacctatctccagcactaactgatattttacaaatacttattggacaaatgaattcttcccttttttttttttttttttgagacagtctctctctgtcgcccaggctggagtgcagtggcgctgtctcggctcactgcaacctccgcctcccaggttcaagcgattctcctgtctcagcctcccgagtagctgggctacaggcgcacaccaccacgcccggctaatttttgtatttttagtagagacggggtttcgccatattggtcaggctggtctcgaactcctgacctcaggtgatccaccgcctcggcctcccaaagtgctgggattaaaggcgtgagccaccgcacctggccgaattcttcacctttgatacttgaaggcagatctccgcctctcaaatttttattctcctgctctcacagtcctcgttaacccctcccttaagactctcccactcccaaactccaaaacttcaaagtctcacttgggcacgaagggtccatacttgaatgcaacactccaagaaggtaaggttcacctgccaaggagacctgtccaccctccactctggtgtccctggcaaacccaaagcagcctccttctgcaatgtgtgtatacaggtggattcctagagtgtacagggacctgtgtcaggggaacacagaggcaaacaagatctcccagctctcctggctggctgtgagcagttctgaagcagagagggaaacaaaaggctgggcagtcggaagaaactgaggaaggctgccaggagtagtactgcaggcagcagggctagttcccaagtcttgagctgaggggtgaagggtgggagaggtggtcatgaggattatgaactgacacgttcaatcacttaccacagcgcctggcagttaggggttccgtaagtgttggttattgctgggggtaaaggattgggggaggagaagagaaattatgaatgagaaaggggaggagatgggatgtgggggctggagggagctgagaatgagttgactggacagtagcgggcagagagaaggggcatgaggagccccggtggtgagagactgcggggaacgggagttgggggtctggggtgggggcacggtaggggcgccgctcgtacctccggcatcggtcagcacctccacgcggccgctgaacatggctttgagcatggtgtcctgtcccgtgagggtgcgcagcgtggtgtagtgcaacgagccgcccacgttcagcttcacgtatttgctgttcggggtcagcggcttgagaccgtaggcggcggggccaggctcgagacccgagggcttgggggcttccagggacggggccgcggcggcagccgggcccgaggcctccgccgacatgccgggtagcagcggcggacggcgatcccaggatctctccgcgccctgcggcctgctcccgaagaccctcggccggcccccagcccttgggccagaccgctcggcgcacacgcccactcaccgcagctactctgcaagaccggccctccgccccatctcgctcgcaccacccggaagccggcgccgggcag

SEQ ID NO: 69 - DNA, 11023 bp, Homo sapiens
gaggaggagggtcggggacggaagcgcagagcacggaccccgccccctcgcggccccgctcgtgacgtcgcggggggcgccggcctccgcccggccccgaggggtaagagcgagcggctggcggatccgacgcgcgagaccgggaggggacgagggcgttgcaatcgttcggggcgggggctttccggggagggggtgctcaggtgcaccagcggcggcggaccctcagactctgccctcccctccctttaacccccttccagccggacgggaggcggggcagggctgagcatttgtgacacctacatttccgtggctcccttcttttcccccgacccctgtttatctcttcgccttccagaagttcttttccatcaggccgtcgcaccttgcgtgggaaggagcaccccacttggaagcaggaggcggggttcagatcttggccctacccctcctgtgttaaagtccgcgagcctcagtttccctcacagtattttttgcctcgccttacccggttttgaggatctgtacgagaaagagaaaggaagtggacatttgttgaattcctgcatggccaaataccacgcagactgcttcatccgccacgtttaatccttattacttggtgttctcagaactcccatttcatggattcttaagctcacagagtcagtgaataacagaaagggattcagatctagccgtttagctgcacagtggagttcttctccagagtcttcccttgtctgggctctggctggaactattcctcagccaaatcctcgccccagaacagtgcttcctgtttctccagctgagaagtctccctttcagtttccttcttccagcacggagtacactgctctgcctccacttagattacttcagaaatgaaatgcagcaaatatttatccagcagtgcagggagttgaacttttggagtcgggaaccttggattcttgttctggctctgccacttactgtgtggccttgggaagtcctttgtcttctctgagctttcttttctctttgcgtaaaagcggtgctcttgtcccattctccctccctgtcttccagcaggctctccccggaggctcagccccctctgctccccatgggcaactgccaggcagggcacaacctgcacctgtgtctggcccaccacccacctctggtctgtgccactttgatcctgctgctccttggcctctctggcctgggccttggcagcttcctcctcacccacaggactggcctgcgcagccctgacatcccccaggtaagttccccacccccgtacccgctcttccttccaacctagacaggcttttgctgctaatctcatctcacccgtcttcttttgctcacaggactgggtctcttttttgagatcttttggccagctgaccctgtgtcccaggaatgggacagtcacagggaagtggcgagggtctcacgtcgtgggcttgctgaccaccttgaacttcggagacggtccagacaggaacaagacccggacattccaggccacagtcctgggaagtcagatgggattgaaaggtgagatcagaggctgggtgtggtggctcacgcctgtaatcccaacactttgggaggctaaggtaggtggatcatttgaggtcaggagttcaagaccagcctggccaacatgatgaaacaccatctctactaaaaatacaaaaattagccaggcatggtggcaggcgcctctaatcccaactactcgggaggctgaggaaggagaatcgcttgaacccaggagatggaggttgcagtgaaccgagatcgcaccattgcactccagcctgggtgacagagcaagactctgtctcaaaaaaaaaaaaaaaaaaaatcaggtgcggtggctcatgcctgtaatcccagcactttgggagtccgagaagggcagatcacgaggttaggagttcgagaccagcctggccaacatggtgaaaccccgtctctactagaaatacaaaaattaacctggtggtctggttgcggtggcccacagcggtaatcccagcagtttgggaggccgaggcgggcagatcatgaggtcaggagtttgagtccagcctgaccaacatggtgaaaccccatctctactaaaaatacaaaaattagccgggcatggttgcacgtgcctgtaatcccagctactcaggaggctgaggcaggagaatcacttgaagccaggaggcggaggttgcagtgagccgagatcgtaccactgcactccatcctgggcaacagagcaaaactcggtctcaaaaaaaaaaattagccaggcttggtggtgcaagcctgtagttccagctacttgggaggctgaggcaggagaattgcttgaacccgggaggtggaggttgcagtgagccaagatcgtgccactgtactccagcctgggagacagagcaagactccgtctcaaacaaacaaacaaacaaaaatacaaaaagtagccaggtgtggtggcaggtgcctgtagtcccagctacttgggaggctgaggcaggagaatcgcttgaacctgggaggcggaggttgcaataagcagagatcacaccactgcactctagcctgggcaacagagactctgtcccgccccgcgccccccccaccaccctgcgccaaaaaaaaaaaagtaaggtgagatcacagaggactgtggggtcgggtatcagaacactcagggctgggccctgcctctgacctcaccaatgatgaccttgggcacatccctggactttagtcacttctgtgattagggctttcagtgaacatgctgccgacagggtaggttttctatgaatgctttcttcctctgccagttctgatgttctttgagtctatccttggaggtaggatgaaatgggctaggtttgacctaatgttttctcatcctttagccacctcctcctagaggcccctttttccttagcatagttctgtatgccacaaaagatgcagaaaaaaattagacaccatcaatttccaaagagctatagtcttctgggaaaatgacaagcgatagggagaatgtgaaaatgtcagtggatgccaataatccctgtgtgacatttggccttatctaaaatatgctaagataaagagggatggaagagggtggtattttctgacttctgaggtcctttacaacactatcattctaagattctcctgtgagtatatatgtgtcgggggagtgggtctctgcatgtccagatgtacatgtatgttaacaaaaataaggaatgtgtccgatatatgcagacttgggacaattctttcccattctttttacttttaaatagatatataatagttttattgagatatgattcatgtaccatacaattcacccattgaaagtgtacagttagggccggatgtggtggctcatgcctgtaatcccagcactttgggaggccaaggcaggcagattgcttgagcgcaggtgttcgagaccagcctggacaaaatggcaagactctgtctctactaaaaatacaaaaaaaaaaaaaaaaaaaagccaggcgtggtggtgcacacctgtggtcccagctacttgggaggctaaggtgggaggattgcttatccctgggaggcagggcttgcagtaaacattctcctgcctcagcctcctgagtagctgggattacaggtgctcgccatcacgctcacctaattcccgccccccagcccaaggagtcttgctctgtcacccagactggagggcagtgatgcgatctcagctcactgaacctctgcctcccagtttcaggagattctcctgcctcagtctcccaagtagctgggattacaggcatgtggcaccatgcccagctaatttttgtatttttagtagagatggggtttcaccatgttggccaggctggtcttgaactcctgacctcatgatccgcccgccttggcctcccaaagtgctgggattacaggtgtgagccactgcgcctggccaatttttgtattttttatagagatgtggtctcactatgttgcccaggctagtttcaaactactgggctcaagtgatcctcctgcctcacctcccaaagtgctgggattacaggcatgagctaccgggtctggcgtattacccaattgttttatttactttctcttgattgctagtaaggttgagcctcttatggtttattgtctgtattcatgttgcctgtgaattacctgtttgtttcctttgttcctttttcttttaagttatttgtctttttcttcttgatttgtaggtctttattctagatagtaaaccttttgtcatttaaatatattataggtattttcaatatgttacttgtttttttaacttatctttcattgcatagaagtctttaatttttatgaggttaggtttatcactcttgtcctttattaaaacttttaggttttgtgtctttcataggaagcccttcctcattttaaaattagaaaatattctggccaggcgtggtggctcattcctataatcccagcctttggaaggctgaggcaggtggatcacctgaggtcaggagttcaagactggcctggccaacatgatgaaaccccgtctctactaaaaatacaaaaaattagccaggcatggtcgtgggcacctgtaatcccagctactcacaaggctgaggcaggagaattgcttaaacctaggaggtggaggttgcagtgagctgagattgcaccactgcactccagcctgggcaacaagagtgaaactctgtctcaaaaataataaaataaaataaaataaaataaaatattctgtattttctttaaatacttaagtttttttttagtttgtatagttctttaatacatctgaactttattttataagataacagtttgacgctatgtttttttctacatggaaattttcccaaggccatttactgaggccatcctttccccactaatttaaaatagggtgagaaccttttaatggattttggtaccaagtgagaaactgctttcttaaaaagaatgaactagtttatgcaaactgacatgggcaatgtgtatctgcccatttcactgcagccttgcgagtattagtatggttgttgtattgattgtaatttaagttaatttaaattacaacttaatttgtgtttatattgatacaaagttattttcatttctcagtgatataaataatggtatatggaatactttattgaatagaatcaatgccaaaacacctggtattatagaaagccttaaaaaatgactaggggcaggcgtggtggttcatgcctggaatcccaacattttgggaggtcagggtagcaggatggcttgagcccaggagtttgagtccagcccgggcaatacagtgataccctgtctctacaaaaaaatttttttaaattagccaggtaggtggcacacacttgtagccctgcctactcaggagactgaggtgggaggatcacttgagcctaggaggttgaggctcccgtgagctgggatcgtgccactgcactccaacctgcacgacaaagtgagaccccatctcaaaaaaataaagaaagaaagaaaatacaagaaaagggccgggcacggtggctcacgcctgtaatcccagcactttgggaggccaaggcgggcggatcacgaggtcaggagatcaagaccatcctggctaccacagtgaaaccccgtctctactaaaaatacaaaaaattagctgggcctggtggtgggcacctgtagtcccagctactcgggagactgaggcaggagaatggtgtgaacccgggaggcggagcttgcagtgagccgagattgcgccactgcactccagcctgggtgatagagcgagactccgcctcaaaaaaaaaaaaagaaaatacaagaaaagaagcgtgaagacagaggctcccgcgtcacctctcattttcttccattttctcttctgtgcctttcacaggatcttctgcaggacaactggtccttatcacagccagggtgaccacagaaaggactgcaggaacctgcctatattttagtgctgttccaggaatcctaccctccagccagccacccatatcctgctcagaggagggggctggaaatgccaccctgagccctagaatgggtgaggaatgtgttagtgtctggagccatgaaggccttgtgctgaccaagctgctcacctcggtaagagcctcagatgggtcgccagggttttgtagactgcctgctgactactgtatcttgaaggtccctggaaacaattctaccttgtagaaaaagcacaggttttataaccctgccttgggggctgtgtgacgtagaacaagtgtctaaacatctctgagtgtcagcatcctcatctgtaaaacagaaaacatgaccctatctcttaattccatcaaataaggattaaatgagaatgaccgtgaagtgcccagcacattgcctgggacatagagatttgataagtgacagctattgttgtttactattgtctttaaaacattctctctacttcaaaggagttcagaagctataataagaggcaaatgggctaattgctattagagagatgtgagcaaagtgttatgcaaacacagagaaaggagccattaaccctaacttgaacatttatggagagtgcatcacagagaaggtggcatttaccagagagcattgtgcacagtggtttataatgcacaaagtgctctcagggttcattaattcatttgatcttaaaatagccttttgaggtaggtgttattatcccattttacagatgaggaaacaggtttagagaaagggagtgaattgctgcaggccacacaactggttaagtggcagagccagggttgcaacccacaccttctgtcaagtcagaatgatccttgaagaatgaggaagatttggacagggactgcagtagaggaggttcaggagagggggaggtacactccaggcaaaggcaccagcatgcgcacaggcctagagattgaaaagtgttcagccaggtgtcacatctgtaatcccagcactttggaaggccgaagcaaggagaatgcctgaggccaggagttccagaccagcctggagaacatagcaagacctcgtttctttttcgcttttttttttttttttttttttgagacggagtctcactctgttacccaggctggggtgcagtggcacaatctcggctcactgcaagctccacctcacaggttcatgccattctcctgcctcaggctcccgagtagctgggactacaggcgcctgccaccatgcccggctaatttttgtatttttagtagagacagggtttcaccttgttagccaggatgatctcaatctcctgacctcgtgatccacccacctcagcctcccaaagtgctgggattacaggtgtgagccactgcgcctggcgaccccatttcttaaaaaaaacatttttttttttaattagcagggtgtggtggtacacacctatagtcccagctactcaggaggctgaggtgggaggatcctttgatcccaggagtttgaggctgcagtgagccatgattgtgccactgcactccagcctggttgccagagtgagaccctgtctcaagaaggaaaaaaaaagaaagtgttcagcctttgggagcactccatgttgagaggcttaggaaggagaaaaggcaagagagaccacagggatttgatggagaggctctgtgaatgcaggatagagggctatgacctgatgctgaaggccgtgggggccactgaggagttttaaggaggagagagatgtgcttccctggtgctgggtggagaatggctgagtggaggagggccatcagtcaggaggctgctgcacactccactctcacatttgaaaataccccatgaggcacggtggctcacgcctgtaatcccagcactttgggaggccaaggccggtggatcacttgaggtcaggaccagcctggccaacatggtgaaaccccatctctactaaaaatttaaaaattagctggatgttgtggcgggcgtctgtgatcccagctactcaggaggctgaggcaggagaatctctggaacctgggaggcagaggttgtagtgagctgagatcatgccactgcactccagcctgggcaacagagtgagactccgtctcaaataaagaaaaaaagaaaagaccccatgaggagcacaacctgggacttggaatcagagatctggtttccagatctagcactgcttgcactttttttttttttttttttgagatggagtcttgctctatcgcccaggcgggagtgcagtggcgcaatctcagcttactgcaagctccgcctcccaggttcacgccattctcctgcctcagcctcccaagtagctgggactacaggcgcccgccaccatgcccggctaagtttttgtatttttagtagagatggggtttcactgtgttagccaggatggtctcaatctcctgacctcgtgatccacccacctcggcctctcaaagtgctgggattacaggtgtgagccaccgcacccagccacttatacatctttaaactgtggatcataatgaagtttcctatctcatggagttatgatggggtttcaggttgataattgggcaagaaagtagtttttaaaccatcaagacaaatgttcgagcctgggcaacatggtgaaaccccatctctacaaaaaaacacacaaaaaattagctgggcgtggtggcacacacctgtggtcccagctactcaggaggctgaggtgggaagatcgctggagcccaggaggcggaggttgcagtgagccgagattgcactactgcactccagcctgagttacagagtgagaccctgcctcaaaaagaaaaaaaaaaaaaagggccaggcgcggtgtttcacgcctgtaatcccagcactttgggaggccgaggtgggcggatcatgaggtcaggagatcaagaccatcctggctaacacggtgaaaccccgtctctactaaaaatacaaaaaatgagccaggcgtggtggcgggcacctgtagtcccagctacttgggaggctgaggcaggagaatggcgtgaacccaggaggcggagcttgcagtgagctgagatcgcgccactgcactctagcctgggcgacagagcaagactccatctcaaaaaaaaaaaaaaaagacaaatgtcagcttatatgaaaataacattttcccttcagttgctccctagatgtggagagccctctccctcatggaggctccttctatagcccttggactggattaacatgtcctcctcctcctctccctgtacccctccctaggaggagctggctctgtgtggctccaggctgctggtcttgggctccttcctgcttctcttctgtggccttctctgctgtgtcactgctatgtgcttccacccgcgccgggagtcccactggtctagaacccggctctgagggcactggcctagttcccgacttgtttctcaggtgaggttctttgctccagtcctgcgggagcagggaatggggtgggggtgggggttgtaaccggggtagagcagatccttggacttttcctcaaagactgctgcttctgagtccccgagaacctcttcaaccacagctctcccttagggactgggaacaatttgacaccgtcagcattcaatatttttctaattactttaacttttttattataaaatagttaacacttatgtagaaaagtccaatagtataaaaggacagcttggcaaattattataaagtggatacttataaataccactgagtagaatattaccagctgtccagaaaccccccatggtcccttccttcctgacaatgccctctctctccctagaaattactgtcctgctttataatgtattgccatgtatgtattcctaaataatatagtttggttttacttatttttgaaactatgtagacagaatcatacacattcttttgtggctgacttctttcaagcaacattgtgattttaagactcataactagttcacatccaagcatttgggtaacaatggtgagttaagagggttcacatttgatgatttgtcctgaatatgaaccatgtttgtcttgcttttgtcctgaaattccaatacccagttttatgatggaaattttgtaaaattcaacttgaaccgctcagaagagtctaactgatgatactcatttactggggacatagtatgtgcccaagaacttgacatgcaccttctgtcttccatttagtcatcgttacctttagaaaaagctgattccgttaacaagatctttggagggaatcagcttcacaaacgtagcagtgggtgggggtcatgttggttaaccagttcacacatcagctcactaaaggaaaaaatatttctgcaaaaaatcttcacttgtcagaggggggtgcatgaaatttgagagccatgtgttatgcatccagctcttgaactggtctcagcttcagctggctgcagtgccctaggaagttactatgggaaaagtggaaatagttgaggcccagggaactgatcaggccagaggaagtggaagctcaagatcaactgtgcttattttgctgatggctgggcctaaatgccccaaccacctacttgggacaggaaatgacaggaccctctcaaccttggactgggaaaggagggcttcctggcccctgacagaccctggggtcctgaggctaccttagttgggattaaatgcccgtattggtctctagctgtcactccctctgctccttcctcaatttctgcacacatctcagagcttcctctagcagctcttcgacctgttttgttgttttattttctttctccccaggtgtgaatcaacttcttgggccttggctctgagttggaaaaggttttagaaaaagtgaagagctggaatgtgggggaaaataaaaagcttttttgcccagtgg

SEQ ID NO: 70 - DNA, 3072 bp, Homo sapiens
tgaggtgattaaaaacactcctttattgagtcttaaaaaataaacaccttaaagggacagcgtgaagctgagaagtagcatcccaacagcttgtgtccttgggagctgcagtcttctctgaaggaagctgcttctgttccacagacacagggcaaggggtgctatgtatgctttgtacatgtatcaagggtccctcctgggggtggcagagctcagttactctcgccatcactgctgatgatgccacgcatatgtgaccagtctgggggtgcgggacggggccgctcttcatctgagtccagggtccgtcggtacagctcccctgggggtgctgcttctcctaaagggttccaggctgtacgtctgcgtggccggcctaggggaaaggggaaacgagagatcagatgtctgagaaggtccaaccccacctatctgctcctgggcagtgagaggaaaccccttacccgagccactgatgatgttcgcaacatccaaggaggccacctcagctgcctcctccctctgctccttcagggcccgacacttccctagggaaggggtacctggggcagaagaagctggtgattctctcctccccagcaggaaggccctctcctgcagcccccagggcacgccgggcctcacccttcatgcctagcgcttccagttctgcccggaggatactcaggcgctccttgtgtgagcaacaggagcccaacagcttcttgtagtttcgatgggcaccacaggcccgaatgtagcgcttcagcctcatcacagccgggtggtcctctccacggcgacctgagccagcctagcaaggaaagagcagctgaaggccaagcctgctgggcctgaggcagggtctccctcttccctaatagtggcctcccacccctcctcaccctcaccttccctcctttggcctctggacttccatctgaggaggaagaggagcttcgtgtcctgcctttcctggagctcttcttggaagagcggttcttcctctccccctgggggcctccccctgcctcgctgtcacttacctccctctccaagtcactttcctcaccactggtgctgcccagtctggccatctttctagagcctttagctgtgggttcccccttcccactgtcttcctcgtcctcgctgcttccactcaacctcttcccacccttaagctgggtcctgtcctcactcttcctctgcactgggggttctctatctctcccactgtcatccccactgctggctgcctctttctgctcttcctcgctgtctgagtctcccaagagcctctttgcctggcttttctgcttacagctcctctcctccctagctgactttctccggccattgctcctggttctgggtttccaatcccccttttcctcatcctcttctttctcttcctcctccacttcctcctctctctgctctttcttctgggctaggatctcctcttcactctcctgttcactttccttcaggcttttagttcctttatttccctccaccttctttgctgtcctctgaacgggttctgcctcgctctcctcactttcttccctggcctgcttcctactgactgaggccttgcctggtgcctgcttctttaccacaggtttcttcctagtcttccccttgtaccccttttcctcctcctcactgctctcctctcccctctgtgcgggcaggtccctctgccgttcctcatcactgctctcctcaactgcctttgaggctcgccttggattctcctctttggctgggctgacttctgctgccaccccattctttgctgggggtccaaagtagtctgggctggaggcttcagagccggactctggaatatggagaggagagagggttgagacaggctcctcctgtcccttctcccttcacttcggataggttgcctcgagccctgccctgacagttggaggggcagcaggaaacagctatctgtacttgctgttcccggttcctgactcactagccttgctccctcatctaacgcctggggacataagagatgcgcagtgaatgcttcttgagtgaaccaacgatgcagaaggcccccacagcagggaggaagcactaacccgactctgaattgaagcggaacctttttctctccgggtcgctacaaggggtgggaggcctcttgcccttcttggtaaggtccagtttgtcttccctggaagcggcttcatccacctgtgtgtgcgccaagagggcaaactatgcaccaaggctgcgctcaccgcgccccgtcaggcccctcctcctcagcagcaagccccgcctccgcctcccgcggcccaggctccggcccggcacacctgcatcttcagcagctcctcctccaccagccgcttcagtgcctgcttctcctcgggctccaggtggctgcggcccgagtgagctaagtacctccgccgcacgatggaatgcgtaagcgtgctgcagggacatggtgtcaggacggagtcccgacccacccgcgccctttccaaccccatctccaaccccctgggcacctgaggtccgggcggcctcggaagaagctacgggtgaactcctgcatctccttctcccgcgccattttgctcaacccgggattgacggctcccgcctttttttcttctcggcctccgtcagcgcgtttgacagcggctcgcgcacgcgcagtgctgcggcaacgtggggcgagggaccgttggcccttggccgcggaccgcgtgggccgagaactttgccagacgagacttgttttctctgggcagttggagggtctcgcggctcctacccttttttggaacggatcattttaaaagttctcgttagaaaccaattcggcgccggcaccctttgggtgaaacctaatcagcccgcgacgctgcctttctcactggtcacgggcaacagctaggctgctgttatttcgcaaggcagaagagaaaaggcatcctcgcgagcagatgaggaacctcggggataaatccttttgtggcttcaagtgtctaagtacattagagtcaggaacggcgctttccagcgtccgcc

SEQ ID NO: 71 - DNA, 9582 bp, Homo sapiens
acagccttgcagcgtctccggaagtggaggcgggagcggcacggcagccactgcttggggtagcgggagggcagactctgggcgccactcccgggccggtcatgaacgggccggcggacggcgaagtggactacaaaaaaaaataccggaatctgaagcggaagctcaagttcctcatctacgtgagtgctgccgcgggaaggctgtgggggatgaggcctggcgcggacaagatctcagtttacccaggtgtaaagtgggtggggcgagcggccgctggttccggggcccttcacggaggaccgttggcccagcgcaccccttgcccgtgatacaggagcacgagtgcttccaggaggagctgaggaaagcgcaaaggaaattactgaaggtgtcccgggacaagaggtgaggcacgttgcaggggcggagggcgatgtgcttcctaggaaatctacattcggaccccatccccgagtagggccacaagtgcatgggctctttcaagtatccgatgggccagctgggagggacaggtacccaggaggacattgctgcgctggaaaatcactgtccgtgtctccttccctcccctcagtttcctcctagaccgacttctgcagtacgagaacgtggatgaagactcttcgggtgagcaaggtcttcaaaaattggtggagagcatggttcctggtacttagcaagcttcctgggcccccgccttttaggcagtggtggctgatgcagcccccagtggtccttaagcctagttgcttgccttccacctccaccgttctttcattcaggcacttactgagcacctattgtgtttcaggcactgtgcttggcacaggggatacagcagaggcagagataggcaaagcccttggcctcttgtaatttatattctagttgggaagaataagtaaatgaagacaatagactagaattttaggtcataggaaggacttgaaggtaatgaaaacagttatgcggtaatgattatagtagaacaggggttgatgaattgtttctgcaaagggccagatggtaagtaagctttttgcaacatacaatctttgaagcacctactgaactctgccattgtagtagcagccgtaccccataggcaaatacatgagtatggctatgtttctataaaactttataggcactgaaatttgaatttcatatttttccatatgaaaaatttttctttagttttttttttttccaaccgtttaaaagcttaaaagccattcttggccaggtgcagtggcccacgcctgtaatcccaacactttgggaggccgaggtgggcggatcacaaggtcgggagttcaagaccagcctgaccaacatggtgaaacctcgtctctactaaagatacaaaaattagtcgggtgtggtggcgtgcacctgtaatcccagctactggggaggctgaggcaggagaatcatttgaaccctggaggcagaggttgcagtgagccgagatcgctgccactgcattccagcctgggtgacagggcgagactccgtctcaaaaaaaaaaaaaaacgcccttcttagcttgcagaccacacaagcaggcagcaggcaacctctgaatggagtactcaagaaaggcctttcacagagtgacatttgagttgggaccagagaagaaaccagccttccatcctgggcaacatagtgagaccccatctcaattaaaaaaaaattagccatgtatagtggtgtatacatgtggtcccagctacttgggaggcagaaccaggaggatcccttgcctgaaaggtcaaggctgcagtgagccatgatagcaccgctgtgctccagcctgggtgacagagcaagactgtctcaaaagaaagaaaccccatcctggctaacacagtgaaaccctgtctctactaaaaatacaaaaagttagccggggatgttggtgggcacctgtagtcccagttactcgggaggctgaggcagaagaatggcgtgaacctgggaggtggagcttgcagtgagctgagattgcactactgcagtccagcctgggcaacagagccagactccatctcaaaaaaaaaaaaaaaacaaaaaccaatcttgtgaagaagtgggctagagctgtcccggcagaataatataaatgcagctaccctgaggtaagaacaggtcaggcttggttgaagagcagaggcatgaaagagagagaacactgttttcgtccttttatttgaatattgtctgcagttaactatattttacatcataaccagggccccacatgttaaacaaaacaaagtttaacgaaacatttttaagatcactgtatccaattcatcctgacactttttagactgcttttttccccttcttttaatgctggttgcaaaccaataaattgatttcatgacccactaatggcttgagacccacagtttgaaaaagccctaaggtaggcatttgtgggcctcttcctgggtgaggccctcgtaagccatgtcacgtagaatcacctctctccgtggtgcctttaaacattggtctgggccgggcacggtggctcacgcttgtaatcccagcactttgggaggccgaggcaggcagatcacgaggtcaggagatcgagaccgtcctggctaacatggtgaaaccccgtctctactaaaaatacataaaattagctgggtgtggtggcgggcgcctgtagtcccagctactcaggaggctgaggcagaagaatggtgtgaacccgggaggcggagcttgcagtgagccgagattacgccactgcactccagcctgggcaacagagcaagactccgtctcaaaaaaaaaaaaaagcacattggtctgaggcagggattggcatgtggcagccagccacgttttaggacgtagtgttttgtcagaacgcatgatacccatttgcttgttattataggaggattgtagataaggttggggaaataggcaggggcccactcaggtaggtcatagtaggagatttggcttttattgtagcctctcatcccctgcctcttccttccctaggggcttccagttaacatcctgtttgaggggaattcagggcaggaggtgggagagaacccagcatgttcatggccagagtgggttgcatctgaggaggaagagccagcgatgcgagccccactcccgtcctggaggcccacgccctggccagggagacactcgcaaacgacgcttttcagcacagtgtgagggcagccatgacgagagtagagcgttccaggagagcctgcagttaactgggcttgagggattctggaagacttcacagaggaggtggcatttaatctgcttcttaaagggtctgtctgagcagagacattggtaacggcttctataggtgtagcagtcgtttgttcgatgaaagatggcccttctaggcagaggcactgaactaggaaatacatttcttttttgacgaaataggtcagtgtgctttaaagaatacagttacgttagttgaccagaaaggtacattgaagccagattaagcagcaccatgaattcatgcaggtagtgggtgatgtcatcaggaaggatgtgaccaggtttgttttaggtcactctggggttgggggtggacagtgggtggcacggtgaggtgagactgcttagcaggtgattttgacgtgctggtggcctgacctgtgttagttggtgtggggagcagtggatgaaggggaggacttcaggggtagatgaacaggaccctggttatggggagtggggcagaggcaggagttgaagactgctcagctcagaggcaaggaaccagtggcatcaaacagccaaggagtcacagacctggcttggagtcttagcctcacaccttactttctgagcctcggtgacctcatgtgacaagtggaggtgctgcccttcccatccttccttggatctgatgacaaggagaggtggtgagtgggaaagagcctggcaccctggccatgcgtggcaggtgtgttacggaggaaccagagcgggcggggggctggggaggctggagaggctatgggcctccctgggacagctcgagtgtgtggtgcatgcgtgtgcccaccagctggtgagtcagattcccccggggcccttctgttaggttttggtttgtttcatttttttgaggcagggtcttgctctgtcacccaggctggcgtgcagtgttaaaatcacagctcactgcagtctcaatctccgagtagttctcctgcctcagcctcctgagtagctgggactacaagcacacgccaccatgctcggataattgtttttgtttttaatagagatgaggtcttgctaggttgtccaggctgctcttgaactcctggcctcaagcgatctggccacctcagcctctcacagtgctgggattccaggcgtgagcccccgcacctggtcttccagtgcccttctgtagtgtagaggaggttatacctttctgggatggactgggatccccccatccccactgaccagctgtccccatcacagactcagatgccactgcatcatcagataacagcgagacggaggggacacccaagttgtctgacacaccggcccctaagaggtgagaagaagatgcattcctctcgctggggagggtcaggtggggcgcctgggctcctagccacatctgacctcgccctgtcctttctccaggaagagaagccctccgctggggggcgccccctctccctccagcctctccctgcctccttcaacagggtttccccttcaggcctccggggtcccctccccatacctgagctcggtgagttggggtcagggatgggaagtgcttgggagtaaggtgggcgtcatttgggcagaagggctgggcctcggggcaaggccagcccaactttggggacatctgtctgggtgtggcccaagtgtcccgtggagggtgtgagtcggggctgcccccttctctctggtataggaacggggccaggcctgactgaggagagcaaagcccaggacagcatcctgctgctgcccggcccttctgtgctcgggagccccgggagccgcactcatcaccatctcttttgtttttccatcctccttctgtttgcatttcttcccccaccctcaccccggtccattccgcctcccatctccatccccgctcccgcccgcagctggcctcctcccgctaccccccattcccttctgactacctggccctgcagctgcccgagcccagtcccctgaggcccaagcgggagaaacggccccgcctgccccggaaactcaaggtaccctgacgtgggggtgctagggaggggcaggacggcaggaggacagtcacctgagggaggctgaaggcgggggcctgtcagagaaccatgaacagttaatttggggacccagtcagcacttagcactgaggggtggatcacagaagtctcggcttacaggcttgtatggagacaaatcagggcagaaccagccttggaggacccggtgtgcagatgccagggatcccgccctttcatggctgcagtgtagcggggccaggctcattttcccaggggggcgtgttgtgtgatgccaggtagccccagaccgggtcaggattatgggatctagagtcaagtcaagactgcctgttagaaaccacgtggccttgagcaggtctctgctaccctctaggcctcctaggcttggcacctatagggcgagtggtcctactcgatgtgaccagcaagcgcccctggagcgcctcctgttacacggcagtgcacaaagcagaccagtgcctgccctcacagagctcacagtctagcaagataggcagaaaacacaccagaaaagtaggtacttgtggagaagaacagagcgaggtccagagcatggggacgccagggggacgaggctgacacttagggcccagcagtctgggatgttcttgatcagagacttacaggaaatggcagcaagctgtgtggctcctgggcagtgtttctgtcgggcagagtctgtgtttgggagaaaagtaagcagggaattgggtcccggagcaggtcagagggggagctcatgaggtgccagtgtgcaggattcgctgtgaatgaagccttggagacagcagttccctggcggggcgcaggttgcaggtgtggagggggagtgatctaattgcatcttaacaaaattgcagacactggtggtcagagaacagactgagcggtggagtgagttgggacgggagtgaggaggccaccacggtaaaccaggccaagggcagagggtccagagggagctgcggacccatttcagagaatgagcatgggagttcctggaggacctggtgtgggctgtgcgggagagaggccaggatgcctccagggctttagtctgagcacgagtggagtctccctccctggagatgggagggctgtgggaccacaggcttggaggaaaactgagtctggccgcggatgtgtcagatgccatctggaaaggcagctagatagcggcccgtgaggggctgcgcatttggaagccgccaggctggcggtagatgcaagccttgggagagatggggatgggctgaggggcagagcggagtggggaccaactgggcggctcccagggttctggagccagaagcagaatgagaggccgcatttgcggtggtctggagtacaggatctggagctctaatcccaactctgccgttttctccgtgtgaccttggccctgtgaggcttcacctcttgagcctgagaagcagaggtgacagtactggccctggttcttagcaggggggtggcgggcagggtagggggtggcgcagcactggggggcactttgaggctttctggctgggtgctgagtcctgaagcagagtcatgtccgggagcaaagttgtagacattctggagagaaggtttgagagggtggcccaggtccatggctgtcgggggaggtggggagaagccaggaaaggcctcagcaaggagaacgtgtaagcccagggtgagtggatttggatattcctggctgaagccatagtgggaagggagacagggccacagggaaagcactgcctgggccagagcaggagtggtaagaaattggcaagaagaaccgggtggggtggggtcatggaaggcctggacagtggcctgaagtgggaatttgtctgttactgtcaggggagcgggagtccctgaagggccaggggagtgaggagatggaaggaagggagtccaagcagaggaaggatagctgtgaagacagaagcaggttggttctgtcaggcctgagttggacttggccagctttgaatcccagctcttccagtgctcaccatgcgacctcagcgttgtcatttcactctttaagccacagctctctttctccattcagtggcggcattgtgcggagaatgtgagtgaagggatgaaaatcgctcggcccgtgcctggcccctagtaagccacagagaaatgtgagccgctgccagtcaggctgagaggacgccactgaggaagtccaggccagggtgggacatgctgcgcacagtggggaaggagaggaggtggccagaggaggggatggtcctttccagtcatacacgcatgtctgcttgtgtgtgtacatgtgggggcctggtgcagggcgtgggggtgctgttcagagttggaccccccatcatccatcctgccagcctcctataccctgaggcctgacccaccctggcccccacaccaccccagcagcggagatgagggtaagtgagggctccttaggaagcagagaggaggccacagggccaaatgtgacactcagaagggccactggagaccacgcatggcgtttcctgccagcccactcagcatctagcccagggccagactggacactgccccgcaggacccagcaggcctaagcctcaggacctccatgtccacaccaggttcagcctcctctgctggcacgtgacttctccccgtttcccgccccccagtgtcctgaggctgggagggcattaacagaaaccacctgacacacagcaggtgcccagtttgtgcccacagacaaagcacggggactgcagaggagacccacagagctctctagggagggtttgtgaggacctggcagcgggggggagctgaagggttgagcagggcagaggccacttcccaccctcagaggacaaagcaggacttctgacaaatagagcaggatgcccagggggaggggctgcctgtcgtcccgcaggcggcactcccgccccgaggccccgagtggcacggtgacgcgctcaggtctgtgttttagagcgcgcgctctggctgccgtgcggaggagctggatctgggagaggctgcgggcagggagtccagttaggaggctgggaccgcagcccaggtgagctaagaggagggctgggcctaggccacagctgccgggaccccgaggaggggcccatccaagacataatacaagcttcttgggggcagataagccgctggggctcctggctcaggcagcctgcaataccctccaccgaaccagtgagtgccgcagaagagggagaggaggagtagggagaggaagctggtggcaggtggcacctccggggccggcaggcaggcaagcactccaggccgactccgcctctggcttaacccctgtctcagggcagcccaggcgcctccctggagagggcaggtgcccgggcctttccctcccggtttcctgtgagacacccccatcccctcatctcacctctatcaccacccccaggcacttgctggtttgaggctctcgaggggctgaggggggcaggccctgagtgcagcatgggttggcccagctgtgcccagggcctcttccccctccccagagctgccctggggggcaaagcctagtctcctgaggccccagtgcctccctgactagtccccctgtgtttcttccccctgctgcagatggcggtgggaccccccgactgccctgtgggagggccgctgaccttccctggccggggttctggggctggggtcgggacaaccctgacccccctcccaccccctaagatgcccccccccacgatcctgagcacggtccctcggcagatgttcagcgatgcaggtagcggggacgatgccttggatggagacgatgacctggtgatcgacatcccggagtgaccgtgacatcacgccatgcccaccacggccccgcccggcgccctccccgtgccagcacacacgagtccagcttcctcggaggtgtttattgatgcccagctgccatgctccggccactgacacaaccagaaaaggcgtaaacatgcacgggtgtcccccaggagggtggcaggggccctgccttcaaaccccggccccctccaggggacagttatttaaacgagtggccgggagcatctgccacctgctggggaggcagagaccctgcaatggccacctctttaaaagggcagctgtacagggctaggttttttcaatgaagtttctgtattaaaggagtggctctggg

SEQ ID NO: 72 - DNA, 5567 bp, Homo sapiens
ttcctcggaggtgtttattgatgcccagctgccatgctccggccactgacacaaccagaaaaggcgtaaacatgcacgggtgtcccccaggagggtggcaggggccctgccttcaaaccccggccccctccaggggacagttatttaaacgagtggccgggagcatctgccacctgctggggaggcagagaccctgcaatggccacctctttaaaagggcagctgtacagggctaggttttttcaatgaagtttctgtattaaaggagtggctctgggtttgttttttgtcctttttttttgagacattctcctcctctgaacctcccctaatccgacctcctccctgttgggggagagggacggggcagcgtggagaggcaggagtgaggagcgcgggggcctggggccgggctctgagcactgcccgggtgtgcagatgatggggggtttgcatatttgcagggactagcgagtcaggcaggaggtttgcatatgtgaatatagaactccgcagcccctcatgagcagacagacccgggtcacggagactcacaaaaataggtagtgcagggtgggggcagcccaccctgtgtaaacgtgcaacacactcgtgcgaaggttgggtactggacccggctcgatgggcctgtgccgggacactgctgtccactcaggctgaggacagagccccggccgcagggggcagctcactggtcagggtgtgccagcgctccagggctgcgtccggctgctgcaggcagtcactccagtgcttccgagcctcgcctcgggcacctggccccagggacacgccacctggggagcaggtgggcagggtcagggccacctccctgccacttgcccgccctcaacacccgcagccagctcctccctcaccaatgaagtcattggatttgccaatgtcatagtcccagacggtgacttccagggtcttggtggccagagtggagagctctatctcgtagaaaaactcctagggacaaggccggccacccgttcgtgagccagctccccagcccctccctggcctccctccatgtcccgtcccctcctgggtacctcgttaaattctgggttgagagtcttcttcttcacacacgtcttatgcttggatttcttgtccacatcgggcctcaggtacctgggggtggggtggagggagacgaactgaggggtgagggacaggccaggcccaactcaggccagggcaggctccctggggaggagagggtcagagcaagggctcacgtcttgacgtaggggtccgagtaaccgttgacgtccatggcagccagatgggcgcagcgcaagatgcctaccagcagtccccggcgccgcgagctgtagctgagactcagcaggatgcggccacgctcctccagcagcccctgcccctgctccgcctgctccaactgcggggcacagactcagggtcagcctgggcccctgcagcctcccacccacatgcatccccatccccatgaggtgcctcacctccttcagataacaggagatgcccctcagcgccgctgacatggaagagggggacgccagctgagggggcaaagagaaggttctggaagcctggcctccccagggccccctcccctggcgcccctgcagcccccacacagaccgggacctggcgctcgaggcagatgttaaaatgcttcttctgcgaaggcttgaggcggcggaggggcacgcggatctccccaataaactcattgtgactcagcttgtcctcatcacagacggcgatcctggtcgggaactgcagtgtcagggcccctggggtacctgagccccgttccggggtgtaggaagggccttggaccagcccagctctgccctaaacactacgtctcatctggaagacaggctggcacttgagaaggacaagcagatttgcccattcctctgtccctccctctgcagccacccggctgtccctggtccatcaggacatgctcagccattgtgggaagccctcagaaatcttggagcacgctgctcactgcctccattcagggcctgggggcaggagccgaacaccacggtggatgtggccatagacacaggccgtgagagctagaagggccttggagccttgggcagccagaccagtaccccacgcctcctcgggaacccccgtccttttcctgcatgcagcagagagccagccccgcagggactcactaagaaatgattgctttccagccacctgtcctcctgcagtccctgccctgcctccgcagtgacccactaccaggctgggcatctgtggcatggaggatgggcagatcccagccctgccacttctgagccacctgtgtgaccttgggcaagtcacttgatcaccctatgcctcaattcccatctgtaaatggagatagtcaagggaaagaaagaaatgtgaaaatgctaagcctgggctgggccctggtgagcgctcattttttggtctcattctggttttggcctctggcctcccctccattccacccgaatagctgaaaccaaggtggcctctctgctgcacagccctgaccatcagggaaggtcccagctgcaaatccaagcacaaaggcagaggtctctccagagcctgggtttcgctgcccgccacctgacttgagggagtactctccctacatctccatctcctaggatgacggagcaagttccctgtccctgaagacttcactccttaagagattttaggggaactcaaggcacggaaggggcagaccaaagctgcagaggtctggcttaagccaagggctctgagaaggggtctcggcaacccaggaacgtttttgggagggggcagagcttggactgaacctcagatgagcggaatttaggctggcaggaaggagctttccagatagaaaacaacaggaaaagttcaggagttgtggaactggccagttggaagaagggagtcctctgtttgaggggcagaagatacttttgttttgtttttgagatggagtctccatcacccaggctggagtgcagtggtgcgatctcggctcactgcaacctctgcctcccgggttcaagtgatcctcctgcctcagcctctcgagtagctgggatttacaggtacatgccaccacgcccggctaatttttgtatttttagtagagacgggggtttcaccaagttggccaggctggtcttgaactcctgacctcaagtgatccgcccacctcggcctcccaaagtgctgggattacaggtgtgagccaccacacctggcaggcaggagatattgaggggcaggaatggcagggaagaattttggcctgctgccaaaggggctagggagccgctgatggttcttgagcatcagagaggtacgggcttaatgggacatagatcaaccaaccagcggttacaatgtcagctgtccccgagctgctgctgggtggtggggaggggggccctcacctgagcaccttgtgcgtgatgtcgtcatctgtgatcccgctgtaagtcaggtcctcattccacacgggattcagtgtgttcctctgagtcttcgtttttagcttattggcctgggatgtggggatgaaaggttctcaatacctgtcctccagccccacaggctggagtcatgggctgggccgggcggggcgagaggaggctgttaccttacaggctccaggcagcaagtgcagcttgacgtaggggtcggcgaggccattgaaatccatgggcttgaggccctggagaggagggcaggggagagggctagaggctcccggcacctctctccatccctcttgtagagctggaccctggaggagcccagaaggagggggcaagggcaggacgaaggagcaggcctgggaagggaaggaggaatgggccccctctgggggctgcacgcaaaccgggcccgggcttgggtggcagggagtgcccaccttggccctgaggatgctacagtgcagagtgcaggaggcccggtcgtagagaaggtcaaactccagcgtgcctagggcggctggagagagaggaaaggcagcatgggtcggtatggagacaggtgtgtgcgagaggccagcaggtgggcactggctctgtgtgtctctctctcttgccagcccgcgagtgtgagtgcaagaggctgagtgggcccatgcgtgtgtgcgtctgggtccctggctcggccgcaactggggctgtgtgggtggtggagtgtctcagcagaaatactgaatattgagccttgctgaagctgtaatctccacgctgactgcagctgtggtggccgtccctgccacccccccactgccctcctcccctacctacatgcacagccagcagggcccatccccctctccccccaccacggcaagcctggagacccccaccagcacatggggcctccaagcccccagactcactggcatcatccgagtcatagctgtccacctccgcaccatcctcaggcgtggtggccccaaggagggctgcagggggggccagagccagggggaccagatgggcgggggcctccccgccgcccccgccgcccccttcaggtcctggtccccgggggaagtagtcagagatctggcggatgggccggatgggcccggggcacacgttgatggccatgtgctcctggatgttgatggtcatgcgatcgcccctgcggcccctcatgcagcacccctggctaggagagggcgtgtgagccagtgagcccatcatacctagccatcctggctgagggccaggcgacggcctcctcggtctgtggggccctcactggcctcccttcctaggtgtcgagggagagggtggtgtgtgccagccggtggcaggtgggaggcctgggccctgcagaccccaagctgactccacaggggctgggctgccaacccactccttgcagaagtcgaggttgcaccaccccgtcctcacccacccacttctaggttgtccctgtatcatcttgccagctccttcctctcctccggggctcccctctgctcctgagcctgcctgtcccccaaggggccctgcagggccccgcctctgtttctcggaggctctgtcctcctctgcaccaggcgctggtctagtcagggtgtcacccacccctctaggctccaactgcccactgtcccctcattcagccccaggacctgtctgcctgcctggttcccccgctcgctcaccacagcccacggtggagaccccagcctcagatgccacctctggctcctcaggggagccagaaattgcagccgcaggagagccgaacacccccgtagcgcacacaggctggcacgcttccccgcaccctcacgcccccggcctgcccagccccctgcacctgcctctgcctccaacaggtgcccaggcactggggggacggcgggcgcaggctgggcggcggcggccggcgaggagagcgcggagtcgagctgtgcgagccgagagggagggagcgccgagaaagtgcggggaggagggggtgagcgaggtggaggcgaggatgcagccggcgcggcggcg

SEQ ID NO: 73 - DNA, 6439 bp, Homo sapiens
tggcgttcacgcagatcgtcttttattagcggtctgtaaagcacctcccagggtcccccgaccccagattggaggaagccttgagaggtcagtagcaccagggacatggcagggcccgagggcgcgatgtgcagccgatggtgagggactgggcgccctcgcctgcccccggggttgtcagcactgggaaggcttgggggtagcagccacctccttcccccaacccaacagactagttcaaatttgggtaaataaataaaataaataagattcctcaagctggcctaccctggagaggagccgtggttgcagccggccactcgggaggcccgagggccagcgggggttagttggggcgtcctctcctctcgggtgatggggagccctgggggatggcagcataggggctgggatggccttggcagaggcgtctccccacattctgactcctggtccccttgaaaccctgttggtgtccctccccacaagccctcctgccctcagtgggtgggaggcggtgccccctcccctcctccagcgcaagggtgtgcaggaagggggcagagtagggggaagaggtcccctctctccaccccctcagtccccgagagatggggcctcttccctttcggggtcatcgtcagtcctggggttgtccgggcaagaggaccctggctcccaaccccagccatcagccccagagccctgtctccacgggggtgggggtggggagggggagggtcccggcccccggcctcagtcctgggcctggcaggccgggggcggccgggagcggggccagaagaggcggcaggccccacggcagatgaggaagaaccagtagagctgaggggccaggagcagcgcagcgcccaggttgacgtgggcagggatggccaggggcacggccagcaggggcaggccggcatggcgcccgtaggcccagtacaggtagggaaagagcagcacccggcagcagaggaagctgagcagcatcagggccccgttcaccttgtgcagcagtgtgtgctgctgcttgtactgaggagacacagacacagtggccacggcagcagaagggctcggccccccttggccctctccctgcctccctgcgaccctagcaggcagctcctcccaaaccagacactttgccaggacacaagcaccaggtgctcaaaatgcacggggtgagggggggatgacgaaggggctagagcccttggcagcaaccttgaaggtccctccccttcctgtgacctccccattgggctcctgcaccctcccatgctcactcacctggatgaggatcttgccaaggcagacgaagggcgtgctgacctctgccatcaacatgcaacccagaaagaagtctcccttaccctgtcgccacacctgggcacagaggcaggaaggtgaggagctggggctctccctgggttcttgggcagcccccgcccttcctctttcccctctgtcactttgggagatgcttgactctgaacatcagaacacctgggtgcagggctgggtgcagtggctcacgccggtaatcccagcactttgggaggctgaggcaggtggatcacgaggtcaggagtttgagaccagcctggccaacatggtgaaaccccgtctgtactaaaaataccaaaaaaattagccaggcgtgttggtgggcacctgtaatcccagctactggggaggctgagatgggagaatcacttgaactcaggaggcggaggtttcagtgagccgagatcacaccactgcactccagcctgagtgacagagagagactccgtcttggaaagaaaaaaaagagaaagaacacctgggtgcaggagcaggtgcatgacttggctgcatccctctcacggtcctgcagaaagactgtgtcccttatgtaacaggtgaggaaactgaggctcagagacgtgcaaccacaaatccaaagagccacagccgggcatcgtccagcccagggccaggctgcccccacaccctggtgccctgggctggtgctcagtgaaccctgcctgtccacagctttccctgggaatacgctgggtctgcttggttgtcagtacgcagacccggggcttcccaggctcctgccagcaccagcaggaccaaggagcaggccacccgcaccccgcccgcccagctccccgggactcaccactgagagtgggaagcacaccagcaccatggcggcatggtggagcaccatgaggaactccttgtgcaggtagccacgcgctatggcccacgtgctgcccggggctctggccgctccgtcgtcccctccatgccctttgacctggtgcttgtgccagtgacagaggaacatggcgtagatgtcgtagatgaagtagggcacagcaaattgcgtgtaggcagaggacagccagtgtctgttgggcagagagacggggtgggggagcaaggaggaaaggggacaccagtgattggggtcagatctcaggggtcagcacagcagccctggacaggagcggagtcttgggtacagatgagggatccagagggtagagggtgagaaacttgcccaaggtcacacagtcatgcagctagtaagagatggtgctgggattcaaacctgtggtctcagaactcacccatgttcctctctctctgcagtatagtcgggggaaaagaaaagaccagaagatgcccacagaccaaaaggcacagatacagtgccaaaataagcccaggacaggcaggtgggaccttgccatggttatttgtcctaaccttaccatgaggttaggaccagcaacagctgaaggggcgagagtgctggagagagaggtcacaggggtggacgcccattcctgcctcctgggacaggcgatcttccaaacttcccatgcatagccttatttacccctcccaaaaccctgtaaaaggtaggtgtggccatcatccccactgtacaggtgaagaagtgagtcacagaggggctaggtaacctggccaaggaagggacatgggcggtgtggctccacagccctcactgtcatccccaccatccccagaagatccgagaggcatcagagacagaccctgttggcaagtgagaggtcttgtcagcgctgttcgccctgccccaaagtcacccaatctcttgtctattttgtgttgtttttcagggacagccaagcgttaaggggaaaatgcagagcaaaaggagccaaggacaaagaaagttccatgtacttggagagtaaacaaaaacgagaaatggatgaatagacaagacagcatttttcttctggagtcagcacattggcagtttctcttaaatcctgtagtcccaagactggcctggggtgggggcaggaggtcagagaggcaggacctggggtgctcgccccacaaggggtggagggatgaaagcagagtcagccagaagccatcaccaaacatgaggcacgtggaggaggctgtggagaagttggggctgaggcctctgaggatggggagcctgaggcaggcggcctgtgagtggagccaacccattctccagcagggacggtaccagggaaaagggaacctgagactggtgcagtggtgtggagctgcggcccagaggcagggaaagatgagaggggaggggcagctgtagagaacgcgaagcgggaacacagggagagaggtcccaagtggcctggaggagtcagggcaggaagctgcccagaatgcaggcccagcagaggtgatgggagatgggacagctgggctggtgcaggagaccaggaggggccaccaggccctgggctgtcatgtgaggtgttagatcccatccccaccctcttggcaattaggtgctcagaagtaggaacagctgctgccctggattaacccggatcctccccacctacctgaggattaaagcagggaagacggacaggaacagacacaggggggcctggggagcagggggtacagaagctaaacggtgacctctgcatgtgaaggctggggaggaagtgctggatcccaggctcagcttggagcaggggagggaaggggtgggcagaggccaagaagcagccaagtccctgggcggggtctgaagaaagagttaagccaagaactgtcctctgcagctgccacttaactcaattcctctcgctgaagcccttccaggaagggccgctgcctcaccacagaagaggcaactcatcttcgggaaaagaggaggcaaacagaaacagggcaccccccatcaggggcgtccaaatgttccctgggactcagtggctgccacagaagggaagcggtgctgaaagctacaaagggggcgttgtgggcacctctaaggcaacttgcaacgggccacccgtgggtcacctagggcggccgtcagcaccacggacagggcccctctcctccccgtccccccgcctcctgcctgcacacctctgggcctttttggcaaccaccagacactgcagcagctgcctggccacattttggcctcttcaccctcatcccctcccgcactgcctggccgtgtgtggccttgtgcgtgtcatctctcccttgtcctctccctcaggcatggagtggatgccggatgcctggattatgggaagggctgaggggtgagcctggcatgaggagggggcaccccatctgggtgctggctggaaatggggtctgcctcctggggtggaaggcagggaggaggtggggaaccacgacaacacgggagacctggaagccgactagaaagcgctttgaggatcctctctgatccccgctccttctccccctggttctgacctttaaggacaggacaggataaatttatccctgggtgttgagttgcggttattgcagttaacttgctcaggcccaagttaagggcttggggaccacagacagagttccctccaagatgtggggtcttccgggattacccgtacacgccaaccactggcacctgggcaggggggtgtctcgcagcacttactggtcatcaatgatgtgcttgcaggaggtggagacgatgtagccggcagtggaggccatgatggcctggacagaggacaccagcctgggggagagagggaggcgtgctagaaaggcagaagggaagaggcgtgtgccttgatttctcctcgttgctagtctaacgactgcgctttgcgttcagccacttctcgggccagtccttgcctgccttcgcccaaggctgggctgcctgaggtgtgccccaccacaggtacctcacggctctccggcccgctcggctgctgttcctcagtccaccccactccttgccaccttcttccttccccatttgtggaaactgagtctccctcttctcaagcccgcagggtgtctgtcctgaggtgagactgagagtgaactgctggcctggacctctccccacgaggggagcctgggccggttcttgccccgcttagctgtccagtcatgacgcaggcctcactctggaccctttgtgaccccgagttccccagtcactttcccactgtctcctgactgccaccagcctccactctgcactctggccctgttctaggggtgtagagttgtaccatccactcctccatccctggcccccaaacactcaccctgaatgacacctagctgtctggccctggcctcagtccctaatgtcttataggaatgtcttcgccgcatgctggccctgttttggagggtgggagggtgtacggggaagaagagagaggcgggctgaacactagtagaccagatggccgggctggatgaggtctcccagaacagtgagcaaggcaggcagtgaggagagaggaagcctgggggtaaagccccggacccccacaggagctcccagtcccccaccgctgagggtccagagaagtgccaggtcccttccattccctgagaagcccaagaagcagacaggggctgaggggaaagaaagtggtttacctggctgagacaatgactgcgtcggcctcctcccagcgtagctggggcagccgctggagcgtgttcttggagaggaggaagagtccggggaacaccacccccccggccaccatcggggtcagcatggtggctcaggacttgggcagggaggcaggcgggccgtgaaggggcagggaggccgagtggaaggagttaggggtggagaagggacgccaagcccgggaaggagggagaaaacgatgagaaggggcacaaaggggccagggcggggacgggatggggccagggagtccgatgaaactggggagtcgggagggggctggctgggcagagacgggggaggggaggatgggagaaggggagcaggagcaggccagcgagggatggggagaggcaaagaggggatggcttggtgagggacagagaggaagaggggacaggaggaggaggatgcggatggggg

SEQ ID NO: 74 - DNA, 17245 bp, Homo sapiens
cctagcttggcgcggaatccgtgaattgcccgcggcccgagggtgcaggtgatgggtgctgaccgactggggaagcccggagtgtggggactgaggaggggagtggcctggggcgcgctggagcctgcgaggaaggcgccgcctcggatcccccgccccccattccccttcccgaattccaccctccggcccagccatggcctcagtttccccaaacaggaaagggaaggagggtgggcaccccggtctaacggtgcctctcagcctctgagacccagaaccttccttctgcagctcccggactgactggctctgcccttccccatggacgtaagtccgggccccttcccctctctgggccccctcagcgccctctcctaaccccgaatgggcctgtcttccagcacggactggggagggggcttctacccaacagagactacaacctgccagctcaggacgagagctgtcaggaagagtccaggaatggacttcccacgggagggcacatttctggtattcctggcaagataaggagttgactaagtaatccacgagaaaaggcatttccggcagaggaaacagtctgggggtgagagggaggctgcagcatttggggaactgctagggctatcgtgtgtttggaagagggggagggagagaggtaggcagggctaaattgggaattttgtcactgacataaattttaagtgccaggcgtggtggctgtcgcctgtaattccagctactgaggagactgaggtgggaggatcgtttaagcccaggagctcgaggctgcagcgagccatgatcatgccgctgcactccagcctgggtgacagagtgagacactgtctctaaaaaaattgaccaggtgcggtggctcatgcctggaatcccagcactttgggaggccgaggcgggcggatcacctgagatcaggagttcaagaccagcctggccaacatggcaaaaccccctctgtactaaaaatacaaacattagctgggcgtcgtggcgcgcacctgtaatcccagctactagggaggctgaagtaggagaatcgcttgaacccgggtggcagaggttgcatgaaccaagcttgccccactgctccagcctgggtgacagtgatactccgtctcaataagaataataataataaaataaataatagaaaaagttttaagtgagttactgggagccattgacggattgtaagggagggagggatactacacaaggacatctggtgtggaaaggggcaaaattgcaggttggatgacaggagccggtaatgtgggctgagggatggtaaaggagtggcaagggagtcagagacaagagatctctttggagaggcattccagaaggaaaatcagccctagaagactctagaatgctgaagtgcttgatgttgctgaactgggaatgatagggaaaaaggcaggctcagggcacaagataatgagtcagggtgtagtcctgttgacgctctccccaccatctggtggccgttcctctcccagccacctcctcgtccctcatggtattcccgtgttcctgcagcccctctccatctccttgtcaccccttcctcctgtactcgtccaggcctcctctagcccgtggaatccaaccccggctcctgtcagcagccctcccctgctgctccccatccctgccatcgtcttcatcgctgtgggcatctatttgttgctgctgggtctagtcctgctgactaggaactgcctgctggtgaggggtctggtcggggataaagggtgggctctggggaagaggaatcccggtaacctgtcccttcatctgcaggctcttaccctgagacacttgacatttagcccttgcatctatccgttttgtggtaccagggggtccctcctctcctgtccccagccaaaccttttcctttcccctcgggaaagctgccttggctgtcactacctgctgcctattccacatcctgaaccctgtgacctaggcccagggctgctgcgcggacggtagctccccctgcaggaagcaaggttcctccgggcccccagactgctgctggacctgtgcagaagcctgcaactttcctctgcctagcccggcccacttcctggatgcttgctgcccccagcccaccagagctgtgagttccattcctaccccctgccccactgagccctgatctaggtatgatcggtgcattcatttttttgctcaacaacatttattactgagcaccttctcaaggccaggcacggttccagggcatgaatcatgtgcagccaggtaaaaacaacctatcagataatgcctggtgatgaaagctacttgaagaaaataaaatagggtgccagctggagaaaggtgatgtgggtaacatgtagagtacatagccagcacttctaaatgaaagtgagctaaatgaaagttagctaaatgaaaaaacagctcacacagctcctttccgttcaccgaatgaactgtgttctaggtatagggcctctttacggacctttgtttttcccaacaaccctgagaactgagaactaagttgtttttttttctttcctccctccagagctgggtcctcccgtctcctcccctcccctcttcttttctttttgttgttgtttgagacagggtttcactctctcgcccaggctggagtgcagtggtgcgatctaggctcactgcaacctccacctcccaggctcaagtgattctcctgcctcagcctcctgaatagctgggattataggctcacacaactaccatatggctaatttttatatttttagtaaagacggggtttcatcatgttggccaggctggtctcgaactcctgacctcaaatgatccacccgccttggctgcccaacgtgctgggattacaggcgtgagccaccatggcccagccatggttttttttttttttttttttttgagacggagtctcgctctgttgcctaggctagagtacagtggtgtaatctcagctcactgcaatgtccacctcctgggttcaagcaattctcctgcctcagcctcctgagtagtaggaatacaggcgtgtgccaccacgcccagctaatttttgtatttttagtagagacggggtttcaccatgttggccaggctggtctcgaactcctgacctcaggtgatccagagctgggtattttttaaaacctatatgttttttctgattacaaaaagtattatttacaaagtatacatatagaaatacatggaaagtaccaatcactttacaaacccgctctctatcccaaagttgctgtgttttacatgtatctctcatatactaatacagtactatcactgctgtattttaccattatttggcaaaaatggggtggtatcatgtaggttatttcatcatacctgctactgtccccctatcccccgccttttttgagacacgatcttgctctgtcacccaggctggagtctggtggtgcaatcatagctcactgcagcctctacctcctggactgaagcaatcctcccacctcagcctcctgagtagctgagactataggtgcatgccaccacacccagctaatgtttatatctttcacacagatggggtttcatgttgttgcccaggctggtgttgaactcctgggctcaagcgatctgccatcctcagcctcccaaagtgctgggattacaggagtgagccaccatgcccagcctctacttgccctttttttttttttttttgagacgagtcttgctcttgtcacccaggctggagtgcaatggtgcaatctcggctcaccgcaatctctgcctactgggttcaagctattctcctgcctcagcctcccaagtagctgggattacagggatgcgccaccacactaggctaattttgtatttttagtagagacagggtttctccatgttggtcagggtggtctcgaactcccgacctcaggttatctgcctgcctcggcctcctaaagtgctggaattacagatgtgagccaccgggctcagcctctacttgccctttttaacctgacatcacacttcgccacctatccatgcctgtatgtgtagacacataagggttactgtcctcctcctgaagtggggagtaagctggcttagggaagtttagtggcttctccagagtgttacgcaggagagccttgcatcgcaaatagctccacagcgttagctgaggtagaatcctcaggggagaagcctggcttggagaagacaacctgtttctatttgtgggtttaaagatgttaaatgtaatcgaccaccgtcctgaggaatgattattttgagctcagcgattcagacagcaaagcccctgcccttggagtggtgacattccttccctaggatggaaggggaggataaaagcaaattcataacttgggcatatggtgattggtgctaatccctggcatgttttcagttttgaagtaaattgtggggcaaggagcgctttttcagataatcaccttctggtttgccaggggcagtcagcagaggggtctcaggtttggggctgaggggcagaagggcaaaaggaggagaccttgggttctgaaaactcctgtcttggcgtggtggcactcgcctgtaatcccagctactggaaaggctgaggcaggagaatagcttgaacccagtaggcagagattgcggtgagctgagatcatgccactgcactccagcctgggtgacagagtgagactctgtctcaaaaaaaaaaaaccaaagcaaaaaaacctcttgccttagaggagatgctccattagaaaatgatttctggccccctgtcctggggatgccgccccctaccccttctgtctatttgaagtgaatagccagggactcatcacctccttgggagagaggatgggtgaggtgcattgtaaggatagactgggccttcccaccttccccacagagggctgcaagaactttcaaacctggagacatcaggccctgatcctctctggtttctgctggagctaggaagggatttaacagggtggaggacagggcaggttctttctgtccttgagctgtctttccacaaagtatatttaagtccctccctcttcagtttccttgtaataacagcccagaaggttacaaatgtcttgccacttggcagctgtagacactgaggcttacggaggttggagtgacttggaggttatatggctggatcagctggaatagaaacccaggtttctcttccttactgagggagaaacatgcctgctcgcctgctctgcttcttttttttttcttttttcttttttttttgagacggagtcttgttctgtcacccatgctggagtgcagtggtgcaatcttggctcacttcaacctccgcctctcgggttcaagcgattctcctgcctcagcctcctgagtagctgggattacaggtgcccgccaccacacctggctaattttttgtatttttagtagagatggggtttcgtgttagccaggatggtcttgatctcctgacctcgtgatccgcccgccttggcctcccaaagtgctgggattacaggcgtgagccaccacgcctggcctgctctgcttctttcatgtgcatgttgcaaggttctcattcattcattcattcattcattgactcactcaccaaagatttatggagttactgttgaggcactgtctagggccttggggactcagcagaaacaagatggagaaggtccccagcctcgcagggcttccattctggtgatggagagagagaaataaccaggccattacaacagagggtgagaaatgacgtgctatggagcagcggttgctcagccctgcatgcgatcagaagcaggtataggacttaaaaggaaagccaggcatctaggccccacactgaggtctgggctggggctagagtttgtgaatcttttacaagttctcatatgattctgatgcacacaggttaagaaccactgctgagggaagaagctatgataagaatagctctctttcaggccgggtgcggtggctcatgcctgtaatcccagcactttgggaggccaaggcgggcagatcacaaggtcaggagttcgagaccatcctggctaacacggtaaaaccccgtctctactaaaatacaaaaaaaattagccgggcgtggtggcgggcgcctgtagtcccagctactcgggaggctgaggcaggagaatgctgtaaaacccgggaggcggaccttgcagtgagccgagatcgtgccactgcactccagcctgggagacagagcaagattccgtctcaaaaaataataataataataataatatctctctttcttttttttttttttcccaggcagggtctctcttgtcacccaggctggagtgcagtgctccctctgttgcccaggctggaatgcggtggcgtaatctcggctcactgcaacctccgtcccccaggttcgagtgattctcctgcctcagactcccaagtagctgagattacaggcacctgccaccatgcccggctaaagtttgtatttttagtagagacaggttttcaccatgttggccaggctggtcttgaattcctgacctcaggtgatccacctgccttggcctcccaaagtgctgcgattacatacaggcgtgagtcgccatgcccggccaagaacagctctctttcgtccagcactcattacttaccaggcatcgtgcttagttccttccaccgattcccgacaatggccttatgaactaggtcttatattttttcattttattttattttattcttttgagatggagtctcactctgttgcccaggctagagtgcagtaaaacaatctcggctcactgcaatctccatctcctgggtttaagcaagtctcccacctcagcctcccaagtagctgggaccacaggcgtgcgccaccatgcccagctaattttcgtatttttaatagagatgatgtttcaccatgttggccaggctagtcttgaactcctgatctcagatggtgcgcccaccttggcctcccaaagtgctgggattacaggtgtgagccaccacacctggccttaggtgttatattcctataaatgaggaaactgaggctgaaaaaatgaattagccaagctgaggttcaaacccaggccttactgactctagggcctgagctttaaccatctatacgatgatggctggctctcacagagacaacaggaaaaattcaagtgaaaaactctcctgagagccaggagagacacaagggttaacagtcttgcggagtccttgtttaatgtacttaaacagcagattccttccagaagccacatggctgcttgtaacggttgagaaatccattagccagttattaatgacaagatctaaacccttccaagggagagagccaagaaatgcttttaataccctcttttctgaggtaatggcagcagagcctctctcagccatgggttctgtgcacagaatgatggtgtggtccttcaaaagcccgcagaagtgatttcatccccagactgagactccctagagacaccccaaatcacaccctcatcaaacacaagaaaatcacttctctctcccccttccaccatgacggttctagcctcccccaaggaggcagttctgttgacagtagcacagcccaattcagacccctgtccctgcaggtggcaggtcccctcccctcactgcagcccctagtgatatctgatctcaccagccatctgacaccacaccctgaaacctcagctgttggaaaggtcattcccctattcctggcttggccaagtttctgattgaactgtacaactgtgactgtcactacctctgcctctggcctcaaggagccaatcttctgtcacacagccatcctgggccacttcagccatttggcctgactccagcccatgcctaaggcagttgcgggtcatccctgtcccaggggaggacagcagtgcactggatagaccagttctcccttcttgtctctaaggacacgctgctcctattccccaaagagacagacattgtttcctccaggagctgagaagccctcttctttcttctttgcctaaagaaggcaaatgatatgcttagattcatccattcattcagcattcatttatatctcagacacctgctgagcatgagtccagtgctagctcagtggagaatatgggatgagctgcccctgccctggcagacccagagagaggctgatgctcctggcactgggaggcagagggctcaagagggattgcaggcaggactgtacatcccagctccattcccatcacttgcctctctgtctatgcctccatttcctttttttttttttttttttttttttttttgaggcagagtcttgttctgttgcccaggctggagtgcagtgggtcgatctcggcttactgcaacctctgcctcccaggctcaagcgattctcctgcttcaggcttctgagtagctaggattacaggtgcaccccaccacgcccagctaatttttgtgtttttagtagagaagaggtttcgccatgttggcccagctggtcctgaattcctgaccttaagtgatccgcccaccttggcctcccaagttgttgggattacaggcatgagccaccatgtctaaccatccattttctcttttgtaaagaagcccattactcaggattctggtaattaaaaaatataaggctgggcgcggtggctcacacctgtaatcccagcactttgggaggccgaggtgggcggatcacctgaggtcaggagttcgagaccagcctgactaacatggtgaaaccctgtctctactaaaaatacaaaaattagctgggtgtagtggcgggcgcctgtaatcccagctactcaggaggctgagacaggagaatcacttgaacccgggaggcagaggttgccccaagctgagatcccaccattgcactccagcctgggtgacagagcaagactccgtttgaaaaaacaaacaaacaaatagatctaattcttttgaaaacattaaaattgattgggcgcagtggcgcatgcctgtaatcccagcactttgggagaccaaggtgggtttagcccaggagtttgagactagcctgggcaacatgatgaaaccctgtctctacaaaaaaatacaaaaaatgaattagccaggcgtggtggcacgtgcctgtaatcccagctacttgggaggctgaggcaggagaatcgcttgaacccaggaggcggaggttgcagtgagccgagaccgcgccatggcactccagcctggcaacagagcgagactccgtctcaaaaaaaaaaaaaaaaaagtacaaaaaatgagccgagcacggtggttcatgcctgtaatcccagcactttgggaggccaaggcgggcagatacctgaggtcaggaattcaagaccagcctggtcaacatagcgaaaccctgtctctactaaaaatacaaaattagccaagtgtggtggcacatgcctgtaatcccacctacttgggaggctgaggcaggagaaccgcttgaatccagaggtggaagttgcagtgagtggagatcacgccattgtgctccagcctgggcaacaggagtgaaactccatctcggaaaaaaaaaaaaaaaaatggccgggcacagttgctcactcctttaatcttagcactttgggaggctgaggcaggtggatcatctgaggccaggagttccgagaccagcctgaccaacatggtgaaacccccatctctactacaaatacaaaaattagctgggtgtggtggctcacgcctgtagttcagctactcagaaggctgaggcagaactacttgaacccaggaggtggaggttgcagtgagccaagatcgcaccattgcactccaccctgggcaacagagtgagaccctgtctcaaaaaaaaaaaaaaaattaaaaataggtaaattgccattttcaaagatacctgtaaagatttttaaaatcattcatgaatgcggtctgttcgttgcacagagtagatgctcaaaaatggtgaatgagaccctctattttggtctcatgctgaagaagtccataaagcccacaagtcattttcatgatggacagaaaaatgtgtgtgctttctctgtctactgcctcaactgcacagaccccgggactgtagcagaaccatcttttgagcttgacaccgggaggcccaaattctagcacgggacccagggccagttgctctctggtcctcagtctcctcacccataaaatgggaaggagagaaccctgaatcattgcttctagcttctgaactcagttgttcagaacaaggactcactgctgatttttcaacagcacagggaattgcactgttcctgggaatgatggacagtaccctctgttccactgggcaagtgagatttcccaggcctctctgttcccttctccccttagagagcaacagacgtggccccatcccacctccctcaaccctctctctcctccctcaggactgggcacctcgctgcccccgctgctgcccactctgcgactgtgcctgtacgtgccagctccccgactgccagagcctcaactgtctctgcttcgagatcaagctccgatgaggacccagggcccctgccctctggggagcggccagcccccagggcccatgtgccctcctccctgaagagcctttccccacgccactggaaccacagatggcctgccgagcacccaggcctgggaactggaagtggcagcgcagggcctggctccctgcagggcaggactcttggccggctggacggcagctcctctggagggccagaaaagagaggggctagtgctcgggcaggtgccctggcttcccttcccctccacacgtcaacgattctatttgaagttgggcaggggggtggcgctgctcaccacacacaagtgttataggaggagtctggcccttgagtaccgggtacgcaggggtgcctcaaccacactccgtccacggactctccgttattttaggaggtgagtgtagtgccagtatctactctccttcttaaaaaaaaccagggctccagagaatcagaacagccaccatcaccgcagggagtcaagggaggagggagattagagaaggagccagggagggtggcagggaggccacgtgatccgagtcccctcacccctttccttcccacaggtccctggccaaagatttatttctcttgacaaccaagggcctccgtctggatttccaaggaagaatttcctctgaagcaccggtgagtgggcaggggctccctccccatcaatagggccgacccaagtcttcctcccccttcccccatgccgggccccacgatagtgtgaatgtcaggggcttcaggtttccctaaatataggtccctgccagaggatccgtggcgggaaaagggcaggggtcattagagaagatcggggacacatgtggggcgggcaggagctgccttataaccagcccgggaacccctagctcactcgctgctgaccaggctctgccggctccttcggcctcgccgcaggtgggccccttgcaggaccgggccggggtggggatggggttggggttgggccaacagggtccagatggggtccaggtgaggaggggagatttggacgataggagcagggggctcagcatctgggaggcagatcagttcggggacggattttcttttggagaaggaagtcaggctcaaggaagacgtttggcaggaactgtgaccccgcatgccagaggccgagcagcggccggtgcatagccgcgcattctggttttctgtggcgcagaggactaccagcctggctgcggcggcccggcggagagcgcgcacgcatgcgcgacccagcccggcctgccagcctggaactcggatggggaggtctcgcctccgcgcgccgctagttccgccgccttctcgcgctccctgcgtgtcctctcgatgccctttcctccgcctcccttacgcctgggccagtgacagggtgtcggctccgcgccgattcagcccgcgggcgaggcaggctaacgcacgactgcgcgatgtggcccctatggtgacacgcgctgcagccgcgaagaccggaagctggggcggccccgggccgcgcgcgctgggcctgggaggcgaaactcagcttccttcgtttccgacttttccatccgcgtcctccacttccccgttccgccctcccccattgccaacattctggctgagtcacggcgccccagagcgcgccaggctgggggaaaggagcagaagggagggccctagcgacccgcgggatgtggtccgagtcacgtccgaggggggtggggagggatcgtgttctcggcgcccgccccttcctagcgcggcctctgggctgcgcctctcgggggcggcccgtagcccagtccgtcgcctgccattggacgccgcccgctcctcgtaaaggaaaaagctcggcggagggcggagtggtgcctttaaaaggccgggcgccgccttccgcctgcccgcctcctgcgccgccccttccgaggctaaatcggctgcgttcctctcggaacgcgccgcagaaggggtcctggtgacgagtcccgcgttctctccttgaatccactcgccagcccgccgccctctgccgccgcaccctgcacacccgcccctctcctgtgccaggtgagcgcccctcttcacgtgcggggaccagggaccgtggagagggatcttgggggcagtggcgggttgggcgtccgcgtggaggcctcccccatcccatgccagcgtctccccactaccaggcacacacaggctccccggcccctccagcctgaggtcctctaactgcgcaatgcagcggctgcgcgcgctgagtcatggcgggggaggaagccggacgagatgaaggaccattctcccccttttcttgcagggacccctgtggcaaaggattagggccccttagccctggcggggatcctaagaggcagtgaggggtgggggccggcccatgtacagccccagggttctcgcaagtgggagcttggtttctgtcctgggaaacggggcgcccttcgcgaggagggaaacccctccgcggtgcttgatgcccccttaacactttccctgtctctccttatcgggcgaccttgattctgagcccggaacagctgcagccatgcgaagcgacgggagcatttttcaggggaaggcgcttgctcctccacgttcttgccccgtaggaacagtgacgatggcaaagcttaccgctttcctcgcctcgggctagggcttgttccgccgccctttcctgggcttctccttgctctcttatatttttcctaatgcccctttcctaccacccgccccctcccttgtggggaaaagcctgaccttgggatgtccttgaagccttggagcccgggccagccctgggatcttgaggggattggaaggaacaccccagtggcagtcagaagagctgggttctaatctcagatctggctccggggttgctgtgtggcttgaagcacagacctttcccatatctgggccctttcccacgagggtgttgggccctctgcttgattcacgatctttacattctaaaatactccggttcggttttgttttcaggcaaggtgaccccatggcaaggcgcaagccagaagggtccagcttcaacatgacccacctgtccatggctatggccttttcctttcccccagttgccagtgggcaactccaccctcagctgggcaacacccagcaccagacagagttaggaaaggtacaggggcaggcctagcaaagggaagttgggcgtaagagagagctggggaccagaagtgccccagggcctgctgggtgtggggcaggggaggtagggaacatttccctgacctccaggagaggggccctggtcatcgggagatgatgggaaaccctagctaactagtccttcccctctgtttcctgtatccaggaacttgctactaccagcaccatgccctaccaatatccagcactgaccccggagcagaagaaggagctgtctgacatcgctcaccgcatcgtggcacctggcaagggcatcctggctgcagatgagtccactggtgcgggcaggagacagaatgggtggagggtgcagggttgggagtggcaggctgatcccctaattcccatgtgacactcccagggagcattgccaagcggctgcagtccattggcaccgagaacaccgaggagaaccggcgcttctaccgccagctgctgctgacagctgacgaccgcgtgaacccctgcattgggggtgtcatcctcttccatgagacactctaccagaaggcggatgatgggcgtcccttcccccaagttatcaaatccaagggcggtgttgtgggcatcaaggtaaggggagggcctccggacgtgaggtttgagatggaagtggaggaaggaaatccaggttagtgaggcagggaatgaatgctggattggtggcctagagacttgcatggagcctgcttcaggcttagggcatttactcgacatttttaatcctcacaattctgagagaacagtatcattcccactttacacatgaaaatctcagaagctcagggaagtgaagtgttttgctcagagtaagtggcagagccccagtctgacacccaattcactcaacatttctgttgtcaaataacatcccagtgtatcctgtctcagaggattgttactaagtgaactaagtgaaaatattttaatttaattgtaactaagtatttgagtaactaaacattttaagtaaattttttttttttttttttttgagatggagtctcgctgtctcccaggctggagtgcagtggtgcgatctcttggctcactgcaagttccgcctcccaggttcacgccattctcctgcctcagcctcccgagtagctgggactacaggcgcccgccaccacccggctaattttttttgtatttttagtagacactgggtttcaccatgttagccaggatggtctcgatctcctgatctcgtgatctgcccacctcggcctcccaaagtgctgggattacaggcgtgagccaccatgcccggcttaagtaactaaatattttaattgtaactaagtgaaaatatttgccagccctgagatgcagtttaagggattaagtaaatgtgggggaagactggggctaaagaagaggaaagaggggcacgcccagctacctaggaggctgaggcgggaggatcacttgagtccaggaagtggaggcttcagtgagctgagattccaccactgtactccagccggggcgacagtggaaagggtgctagaggtcatttcctgtgtcttaatgttgttaccctgaccccaacaggtagacaagggcgtggtccccctggcagggacaaatggcgagactaccacccaaggtgagaactgtttgattctctgccctacgaacccaaccagagcaggtttgggtgctgggaggagtggaaaccacatgcccctccccaccgtgctctgaccccttcctcttctcttagggttggatgggctgtctgagcgctgtgcccagtacaagaaggacggagctgacttcgccaagtggcgttgtgtgctgaagattggggaacacaccccctcagccctcgccatcatggaaaatgccaatgttctggcccgttatgccagtatctgccagcaggtgggcctgcaggtcctcaataggcaacctcctacctcatttggttccagtgttgttaatttgcctattacctgccatgatgcctacctccccaaaagcaagcattagctttggcccgtggaggacactcaagggctgttgaaggcagaggggccaaggagggatggtgggtggatctgaggcggctcttgtctcctgtaatctgagggctttgaagcctgagtccctggcatcatcaagatacggtcttgaccagtggctgtggagagatgtaggtgggactctgggttaggaggcctcacagtgaccctgtccctcgccctgcagaatggcattgtgcccatcgtggagcctgagatcctccctgatggggaccatgacttgaagcgctgccagtatgtgaccgagaaggtaaatggctacctgcctgaccagtgcaaggtggctggccggggaccctggggctaacccctatcctctcctccaccccactacccaccgtgcgcctgctctgctccaggtgctggctgctgtctacaaggctctgagtgaccaccacatctacctggaaggcaccttgctgaagcccaacatggtcaccccaggccatgcttgcactcagaagttttctcatgaggagattgccatggcgaccgtcacagcgctgcgccgcacagtgccccccgctgtcactggtgaggcccacactcatcttgatctctatgcagtagataagctccacccacaaccctatgcccatttggacggatttccatggcaacttccaccagctcctgccagcttcctgggtctctgaccacagcccctctcgcctcacccctgctctacagggatcaccttcctgtctggaggccagagtgaggaggaggcgtccatcaacctcaatgccattaacaagtgccccctgctgaagccctgggccctgaccttctcctacggccgagccctgcaggcctctgccctgaaggcctggggcgggaagaaggagaacctgaaggctgcgcaggaggagtatgtcaagcgagccctggtaaggataggcaggaggtgggcagggtgcctgggtggatgggactcggagaagagcccttctcactccacccctctccctgcttaggccaacagccttgcctgtcaaggaaagtacactccgagcggtcaggctggggctgctgccagcgagtccctcttcgtctctaaccacgcctattaagcggaggtgttcccaggctgcccccaacactccaggccctgccccctcccactcttgaagaggaggccgcctcctcggggctccaggctggcttgcccgcgctctttcttccctcgtgacagtggtgtgtggtgtcgtctgtgaatgctaagtccatcaccctttccggcacactgccaaataaacagctatttaaggggga

SEQ ID NO: 75 - DNA, 9311 bp, Homo sapiens
ccggagagccggaaccggagtcgcagcggcggtaatagtgcgagactcctctaagtcaccgtccttagcgcgggaccgcggggttcgacgggagttagcgggggtgcggccaggccgttggacgccggggggtcctggggccgatgtgaggggaggcgggggtgggggagccgggccggctctagaatcgagttgtccgctccgagccccggacggacactgatccgcgggctcgtcttggcctttcccaggagacccctgtgcggtgcggagggggcggcggccccgactctgacccgcgccgggggtgggccatggcggagatcagcgacctggaccggcagatcgagcagctgcgtcgctgcgagctcatcaaggagagcgaagtcaaggccctgtgcgctaaggccaggtgagctcgttggccctggggaagggaggccaagccgccgcccacgggttctggcctggggcaaacccaactgagaactttgggcttgcctcgttctggaagctttcccagagaggagcaggatggagccgctgccctcgaggaaaagctagcctgctcggggaagacagagtggataaagacacttaaagtttattagacgatgtgtttccagtggagtaagagtgttacataaagtacttaggaaactcaaggaaacaagtccatctgtcgggggacggaagcttgttggaggggggccgaactgtgggagaggcctcgaataaggaggtggtaaaagagtcagccaaaaaccaaaagtttaagacaggaaagttaaagaccctgtgatttataaaagtcttctaattacaacaacccttaaagattggtggtattgtactcattttacaggtgggaactttcatgttcaaagttacccacaagtaaggaatggggtctgaagccagctcttagtgtcctgtcctttttcaggccataatgcaaaaaggtggagttggatcattcacgttcagggtgggagcctgagaaatcgtagcaagtaagccagggtagaattaagcacgatagggaggccagttcagagttctgtgggaagtaggatgatgtagtggttaaggctctaggttttgcagtgtgagatggctctaggtttgaatctgaactctgccgctttctagctgtgttagtaatcttaagtgtctttatttgtaaagcagaattaatagtacttaataagatgattgtgaagattcagtgagttggtgctggagatgaggttagcacagtgttttggtacagcatacgtgcttgataatcaccaggtattctatttcttttggaagagggcaataatgagatgggctaaagccatcagggagggcttttgagtggaggtaggccttgaaggatgaagataatttggctagctgatggaggcagggccagtgagggaagggcattccaagcaggacgaatgtaacagtggaggccctgagatgcgtggggaacagtcaggggtttaattacctgcctcctctggggaactgtgtgattgtggcttctaccaggctggagaattgtggcagaagagcccacagaattaccctacgtttattgaacagtaaacattggcctttacagggccactatttggcctggcccggtactggcaaaaaacttctatccatctcttccccccagcaatcctatgaggttggaatcatttgctgcattttatcgaataggaagccatgactcgtagaggtctggtgacttaactgaggtcacccactgaggacgtggcagagctgggtcctgaatctgtggccctcaggctctttgcctggccctgcctcacatagactacctgcagccagacagggcctgtgaggggatgatgagcagggtcggcctctttttcgccacctgtctgtggcttttctcttttgccagctgaccagaccagccccatggtgtttttagttgtcccctttccctcagtcctgattggcatttttaggaacttaaacctgttgttgcctggcactattctttaacctcgaagtattgtctccctcacgggccctggatcagtgtggtggtgatggtagacaaagcttagatagcatgctggagtttgcagaatagcaggaagtcgtatattcagtctccatggctccttgcaacagcctaaggaatacgcagggtgggctgagtacttagccccatttcatagcagaggaaactgagcctttgagtagataatgtcttgcccaacatcacgcagctagtcggaggggaagttagttttgcatccaggtctttgactgtgctccgtggtcactgagagccaggcagaggcatttagattttgatgtggggtgtgaggcagcaggaagccatggaaggctgaggggtggagggtcctgcccagttgaaactgagtggaactaggaggtactaggccaaggcctgagttggccgctgttgtcccaggctcagtctgaagcagggccatctctgatacctggttatggcctcctggggacccatcagagacccaggctgaggctggtggtgtcaagagcaccagcttgcctagagggcacagacatgcagatgaaaccagtggaagcacagaggtccgcagtgtctgagctgaaattgctgctactagaaatattagcacagtaggagagctgagcttttgaatcaggtggtcttcagtatgaatctttgccttgtcacctagaagcaatatgaccctcgtcaagtcactttctgattttttgaagtgataatgacatgcagttgagagtccgggtatccgggcacagggcctgctgcgctggtagccgttactgcaggcaggtcctgatagggctggggaagtgctgcaagtggcagaactggggctggaatctgggcctgattcccaggccacactggggttgcgctggcactgaggggggctttgcagagagcacgggccctgcatgtgacctccctgggcttcaggttttcactcagggtctgtggaaggggctggcataaattctcaggaaattgggcttctgggttccaatttagccactctccagcttggtgaccttgaccctcccgcttttctgtaagctttggtttctttttttctttttttttttttttgagacagagttttgctgttgttgcccaggctggagtgccagtggcctgatcttggctcactgcaacctccacctcctaggttcaagtgattctcctacctcagcctcccaagtagctgggattacaggcacgcgccaccatgcccagctaatttttgtatatttactagagacggggtttcaccatgttggccaggatggtctcaatctcttgacctcatgatctgcctgccttggcttcccaaagtgctgggattacaggcatgagccaccgcgcccggcctagcttcggtttctttactgttacgtgaggctgaagagaacctccccagtctgttggaaaggtcactatgagcagttgatggggaaggatgttcagcacaagaagcagtgcaggtgggagagtccgggtactgatgtggcctcttggaccaccgccagtgctgccttctgttcccagaaagccagggcagacctccttcgtgctgcctctgccatacagagcaaggggcataagtgaatcctcctgtccactgagctcaggaaactcattctaagggaagagattggcagaaagaggggggccaggcgagttgggcctcccacatcagaatatcttgataaagagtcagaccccagagccaggcttccctggttcatatcccacctgtgtcactggcaccaagccagcctccttccctgcttcaatttcttcatctgtgtaccgggaatcatcatagtacctgcctgccaagctcttaataacatttgtggcacacagtatgagctcgaatgttcactgctgctattaccaggcaaaatttggaaatacagtgttgcttaaattgggtatctataggctgggtgcagtggctcacatctgtaatcccagcactttgggaggcaaaggtgggtagatcacttgaggtcaggagttcgagaccagcctgggcaacatagtgaaatctcgactctactaaaaatacaaaaattagctgggcgtggtggtacatgcttctaatcccagctactcgggaggttgaggcaggagaatcacttgacccaggaagcagaggtttgcagtgagcaaagatggcgccactgcactccagactgggcaatggagccagactctgtctcaaaaaaaaaaaaaaaaaaaaaaaattgggtgtcttacctggcaaagtgatttcatctcctgctcactcaagtagaagtagactgcactgcaaggagaaataaaaaatatttaagtcctcatagtcataaagaaatactgaacacatggcaagagcacctcacttttttttttttttttttgagatgaagtcttgctctgtcgcccaggctggagtgcagtggcgcgatcttagctcactgcagcccccacctcccaggttcaagcgattctcctgcctcagcctcccaagtagctgggattacaggcacgcgccaccacgcctggctaatttttgtatatttagtagagacagggtttcaccatgttagtcaggctggtctcaaactcctgacctcgtgatctgcccaccctggcatcccaaagtgctgggattacaggcatgagccaccgcacctggccaagagcgcatcactttgaaggcgcatccactgtgggcctgccctgggcacctacccttgtgtctggatagcctgggagaagggctctgtgattggccaagggtgacttaagctctgctgtggagaggatggggagacccgcctcccaggagtgagtcctggatgcggaagagggagcggcagggggagtcagggctggaaaagtcccagcctgctcagaaggcctggaacgctgggataagaggttggactttgtccttttggcagcagggggccacggaagggtgttgcatgctgaagggccgtggtcagcctgttttggggagactgtacgcttcactcctgccccctggagcttccaggactgcctcatatcctcccctccccccaaaaaaggtcaggaattgggctgggctggcctggctgtggtgaccctggtcttctcctgtctccagagagatcttggtagaggagagcaacgtgcagagggtggactcgccagtcacagtgagtacctgctgtccctgcagagccaggcctggtctttcaggcacatgaagtttcctcttcatcttgggggctctataagcccaaccctaagctcttttatctgtcctttccctcaccttcaacggagcactgctaaaagaagtgggggttgctgtgcacgttggctcacacctgtgatcccagcattttgggagggcaaggtgggcacatcacttgaggttaggagttcgagaccagcctggccaacatggtgaaaccgtttctactaaaaatacaaaaattagccacgcgtggtggcacgtgcctgtaatcccagctacttgggaggctgaggcaggagaatcgcttgaaccccagagttggagattgcagtgagctgagatcaggccactgcactccagcctgggtgacagagggagactccgtctcaaaaaaaaacaaaaaaaaacaaaaaaaacaggccgggcgcggcggctcacgcctgtaatcccagcactttgggaggccgaggcaggtggatcatgaggtcaggagatcgagaccatcctggctaacatggtgaaaccccatctctactaaaaatacaaaaaaattagccaggtgtggtggtggacacctgtagtcccagctactcgggaggctgaggcaggagaatgacgtgaacccaggaggcggagcttgcagtgagccgagatcgcgccaccgcactccaggctaggcgacagagtgagactccgtctaaaaaaaaaaaaaagaaaggaaagaaaagaaaggggttatgggaagggactttggatttgttagtggagattcttggccagggcagaaggactcctatttggcgagtgattctgctcacatatctccagggctctgtgttagtaacttgattctgggtactttgtggggagtagagagaggaaggggccgggacatctacctggaaggacttagttctagctcttgcctacagaatagttggtactcagcataggacagtgggtatggttccagaccagactgacttggggtgggagaggagaattttggtcctaggaagtagaagtgcagccaagagtgataaagctcactaaagcagcgggtgtttggagggtagtccctggcaactcccactgcttgagttccaaccccactcttcctgttccccaggtgtgcggcgacatccatggacaattctatgacctcaaagagctgttcagagtaagagtgtggccaacactgtgaaatgtaacggggggatgactggaagacccctgtaattgagggtgggagccttaatttggggcgtggagtgggggcaaggggccccaagttagatgggtggttgtggaagaagggcctccgctggacagaaacaggtagggggtaggggactgtttacgacagggcaaaactttctacttccccacaggtaggtggcgacgtccctgagaccaactacctcttcatgggggactttgtggaccgtggcttctatagcgtcgaaacgttcctcctgctgctggcacttaaggtggcagtccccggcttctgcacccccaacctgggcgacctcgggccgggcctgtcttagtccgttccgccctcatctcctatcgtgaccagccccaccttggagctgtgtcactggtgatggaccgattctgcttttgggggtggtcagagacttgatgggggttgaggccagcggggcagcattctgggaggggcagaggctcactgttgcgaatgtggcaggtcattgatgccactggtgggagaggcagtgtggggccagatgacaaagggcctgggtgccttgctagggacccggtctgtgtctggtaggtgaaagaagagccattaggttcatagttgagggaatgggtcagctttacattctctggaggggtcgtgtgggcctgggaggtggctgatgccacacgattcaggcaagaggtgccaggagtgtgctgggcagtggttgtgaggatggcaggctggcgggcacgaggaggtcagagagggatgtgtggagagaccgtctaggcgccagccctggcttggtggccacccccaggttcgctatcctgatcgcatcacactgatccggggcaaccatgagagtcgccagatcacgcaggtctatggcttctacgatgagtgcctgcgcaagtacggctcggtgactgtgtggcgctactgcactgagatctttgactacctcagcctgtcagccatcatcgatggcaaggtaagccagcccagggctccatgggacagggagaggaggggggcttcaggcctcagccccgtcctctttccctgctctcccctgtagatcttctgcgtgcacgggggcctctccccctccatccagaccctggatcagattcggacaatcgaccgaaagcaagaggtgcctcatgatgggcccatgtgtgacctcctctggtctgacccagaaggtgagggcatgtgggcaggggcaggcagggacagccaggaggggttgggaaagagagggagcagggctggtcttcactgtcactcgtcctccacctgccaaatggctggaaccctggaggaggagcagggaggcctgcatggcaggtgctttgagcacacagtggcttggggcatggcccagagggctgtggaggacaaccaagtcatggctccctgaagtgaaggggccttagaacatgacagcagcttcttcagaggtcagaaccccagaatggtagccccctgagacccctcattttgtgggttttccactagtgtagagcagagctgagatttaaagtcaggtcttctgaggaccagccagagttcctgttgtcacaggcacacacgcacaggcagcctctgctccagcgcagacacacacacacatacacatagcctctgctccatcacagccacacacacgcacacgaggcctctgctccatcacagccacacacatacagacacacacatgcagacacacacatgcagccgctgctccacagtcactccggacctccctgtgacaacacagggtgcccttctgtctctgggagtgcccctttcactcttatgtgctgtttggacggggattgtatgatcactgtgattatgagggggccccaggcattgggcgttctttctcctctggagcttatctgcccctacatttgctgtcctggtccccgccatcccacagaccatattcaggccccatgctctggtcccacgggcctctggtggacttggggaggggccaggctgctcaccctcaaggggcagcgctggcagccagagaagcctgaggacatccctctccatccctccctttccgcatcagacaccacaggctggggcgtgagcccccgaggagccggctacctatttggcagtgacgtggtggcccagttcaacgcagccaatgacattgacatgatctgccgtgcccaccaactggtgatggaaggttacaagtggcacttcaatgagacggtgctcactgtgtggtcggcacccaactactgctaccggtgagccggctgggccgggctgggatgggcgggcatctgagccgagctgctcctgaccctgctgccccgccttccagctgtgggaatgtggcagccatcttggagctggacgagcatctccagaaagatttcatcatctttgaggctgctccccaagagacacggggcatcccctccaagaagcccgtggccgactacttcctgtgaccccgcccggcccctgccccctccaacccttctggccctcgcaccactgtgactctgccatcttcctcagacggaggctgggcgtggggggggctgtcctggctctgctgtcccccaagagggtgcttcgagggtgaggacttctctggagaggcctggagacctagctccatgttcctcctcctctctccccacttgaaccatgaagtttccaataatttttttttctttttttccttcttttttctgtttgtttttagataaaaattttgagaaaaaaaatgaaaaaattctaataaaagaagaaaaatg

SEQ ID NO: 76 - DNA, 3887 bp, Homo sapiens
tgtctccactccattgttttattatgtacaaacgctacagaacgagggggacagacacgcgtggggtaagaagggcctggtgggaggagttcacagagcagacggtgcactgggaccaggagagcagaacacaggccataactatagggcaggtggggcaggaacgggttaaaaacgagatccaagccagccagatcgcaggaggtgcgggggcgtcgtcccccttctgttctccccccaaggtcacagtgcatgcaataaaatatatatacaggagctagatccgtcctctgcaggggctctgagggtccagagctcccttcgggtggcgggaagccagtggcgctccctggcggccaggccgggctggagccacatgcgtcgggggagcgggggtcagtcccagccgttgtctttgatcatgtggttgagttcaatgatgtacttcccctctttgtacttctggctgctctcaaaggcctgttcctgaaaggaggggcgggaccgtcatccccggagcaacagtctcaccacaaggcactggggttgggaagtggacatgagtggccccattttacatatgaggaaactgtggcccagaggggcagggccgtatttctcacaaacacagagtagaatagaactccctgactcaaaggtacttttttaagtactaatgatggctccaacagagaagatagggaagtggctaaaagatttcacagttcagggtttgcaaactggtagcttcatggccattttggcctacaacatgtattatgtttggacagcagacagtttaataaaaataactttaaagtattaaaatataagtaggccttgctcactccagtttgcccagcctgcccccaactcccaaccctgccaatctatgctaccctttacacatctacagtatctgcttggccttgcaggcacttgaggtttttttgtttgtttggttttgagagggagtcttgctctgtcgcccaggctggaagtgcaacggcgcgatatcggctcactgcaacctccgcttcccgggttcaagtgattctgctgccttggccccgagtagctgggattacaggcgcccaccaccacgccgagctaatttttgtatttttagtagagatggggtttcaccatgttagtcaggctgttctcgaactcctgacctcaggtgatccacctgcctcagactcccaaaagtgctgggattacaggcgtgagccaccacacccagcctggcacttgagtttttgacctcttgtttaggccagctctttattaattattattatttttgaaacggagtctcgctctgtctccgctcactgcaaggctctgcctcctgggttcacgcaattctcctgcctcaacctcatgagtagctgggactagaggcgcccgccaccacacccagctgattttttttttttttttttgtatttttggtagagatggggtttcaccgtgttagccaggatggtctcaatctcctgaccttgtgatccacccgcctcggcctcccaaagtgctgggattacaggtgtgagccactgtgcctggccggccagctctttatttggtagaggtccagagtggccaagccacctgtccagagacacacagccaatctgtggcagggtcagcagcgagctcaggtcagggctggctggctggctctgcctgggacatccacctcacagaggcaccacagttccaagcgacgcctgaagaatcctgtcccttgcagtgtcccaagagcatcttcctgagcatctaatctgatccctgtaacaatcctgggtgctaggcagtggctttatcttccactgagagataaggaaatgagactcagggtagtgaaatcagaccctggacagcagcagtggcaatgaggactatggaaagggaggctggtgaacccaagctccatgttgttgcagagtctggggcaatttttctgatactctaaatgacaatataagctggtgaccaagggtttggagtgaaaaaaaaaaaccaaccaaccaactcagattctggtccctattctgttacttaccagttgggtgatcttgggcaagttacctaacatctctgggcctccctgtcttcttctgtagagataataatagcttctacctagaggatcactgcaatgattgaatgagataatagacgccaggcacacaacagtgcaaggcacataaacattccataaatggtgactctgattatatcctaactctctaatggggatccaagtgcctgggagagaagggatgggttaagagaaaagttctacaccccttgcaaggtgcaagataaagagaatgtggtcagggatgctgacttgtgtgagctcggcctatgcaatctgaaaggctatagggtgacagcttgtcaggaggaggtgttggaaggtcaggtcaaaggctagcctggggtcagaggtgggtgactcacatatttccagcccaaagtggtcttgcagttctcgcagtggatgtcggcgacagcatggaggccggtcagcagcacccgctcctcggctggcccgcagcccacgttcaccctgtggggacatggggtagtcccagggagggtcctgccatcacagggcccaccccctcaagcactgtgtctgtcctcagcatccaagaaatgatgctcacaatttcctgcctgcaccggggaactctgggagtctcagcaggatgccaggggtcacaggtcacaacagaggtcagggaaagcaagaagggaggccagatactcacactgagttgaagaggtaggcacgcccctgactgccctggaaggactaaagggtgagagggtgggaagagaggagggggtcagggctgccggtggggagctgccaggcagcccctataggttccagccccactgtggcctggttggttaccttggagatgaggtcgtcgtggttggccaggtgagcgcggcagtgggcacagctatacctccggtgacaatcatccaagtaggcctgaaacgtcttgggctttgaaatccgcaccatggcgggggccgggggcagtggccccacgcggggagcggcccacggggagcagagggagcccagtgcctgccggggagggagtaggtgggctgtcaggacctgggccacacacatgcgaggcactcccagagccgtggggactcgctctgtcacactgggctgctctctcctttccccagagccagcagcctctccggggaccagaggcgtctcggttttgactcagtgaggaggcctcaggttgcatccatggggaaactgaggctcggaggtgcccagggtgagtcacccgcctgcttccggcctcacccttgctgacctggcagctgaagctggaggaaggggctttggaggggctgggctgtcagttcccagtttcgggggagcatgggcgggtaggcactggttggtccttgcgacctcatctggagagcagtggggttcactggtggtttagggggttcatcggggagagggtcccccacctggaggaggtaggaggcctcgccgtgaaggttgagggtcacctaggaggggaggggctctcacctgcgggcgccaaggcctcctctacgctcaggggctcttacctgcaacgcggagccttacctggactccggggctcacctggggcgcgggggtgggggcgggcgccgggggagggggcagtcctcgcgggctgggcaggggcgcggggcgacacgcagccctgacggcgcgggcctcacctcgcctgggcgcgcggggcccggtccgccggggtgggctggcctgggagtggggggcgctcctggcgggcgccgtcccccccgggcccgggttcgcaggcgcc

SEQ ID NO: 77 - DNA, 8748 bp, Homo sapiens
tgatcgaaaggcaaatatttatttttcaggaagagaaacaggagacctcgaggcttctggacttaggaggtccgggcagctggtccatggttgtccaggtagtgccgcagggctgtgggataatccgttatgacgccagtggctcccacgctgaaggctgcttcaaaatccgactcttcattaaggcaccaaaagaccacctgagcagggagggagggggcctgtagattctgaacaattttacatctggagagtggggacccacctcctcctctatggagactccccagcagcagtaggctggagctgattgttaaattctcaggaattttgcaaagtggttattaaacccagccattattaaaaattaaatcatagcctgggtgcagtggctcacgcctgtaatatcaacactttgggacgccgaggcaggagttgaggccaggtgtttaagatcgagtgagacctcatctctacaaaaaactttgtaaaaattaattagcccggtgtggtggtatgcgcctgtgctcccagctacttggaagactgaggtgaaagaattgcttgagcccaggactctaaggctgcagtgagctatggttgcaccactgtactccagcctgggcgatacaacaagacctcgtctcaaaaaaaaaaaaaaaattatatatactgacaattaaattatttatttatttatttatttattttttgagatggagtcttggtttgtcacccgggctggagtacagtggcatgaactcggctcactgcaagctctgcctcccgggttcacaccattctcctgtctcagcctcctgagtagctgggactacagatgtccgccaccacgcccagctaatttttctgtttttagtagagatggggtttcaccatgttagccaggatggtctcgatctcctaacctcgtgatccacccgcctcggcctcccaaagtgctgggattacaggtgtgagccaccgcgcccggccctaaataaattattaaaacaacaagtggccaggcgtagtggctcacgcctgtaatcccagcactttgggaggccgaggcaggcagatcaactaaggtcaggagttcgagaccagcctggccaacatggtgaaatcccatctctactaaaaacagaaaaattagctgggcgtggtggcgggcgactgtaatcccagctactcagaaggctgaggcaggagaatcgcttgaacccaggaggtggaggttgcagtgagctgagatcacgccattgcactctagcctgggcaacagagcaagactctgtctcaaaaaacaaaacaaaacaaaaaacaaaacccaaaacaaacaaaaatccagtaataaatattcaaagcatatctcttgctaatcagtttcctattactgtgttcttgaagtgattaagtctgttgaggctgcaagatggaaatactacatgatggggtgccaccatgcatctcttcccattctgcatttagtggcttcatgtcggcagcctgaaactggccaagatgggagtatttaaaccaggaaaattaatcctcaaatcagggctttcatttgttcctctctgagagctagttgttgaccacttaacagcaccaccctcccccaaacccccattccactgccacctgccccagctcctgcagctctgccccttccctgcccgttgagtgggcactgaggtaggcggagatgggaattttttatttaaaaatacagatgagacgaggtctctctgtattgccaacactggagtgcagtggtgtaatcacagcccactgtagccttgacctcctgggctcaagtgatcctcccacctcagcctcctaactagctgggactacaggcatgcactaccatgcccagttaatattttatttatttatttatttatttttgagacagtcttgctctgtcgcccaggctggagtgcagtggcgtgatctcggctcactatagcctccagctcctgggttcaagtgattctcgtgcttgagcctcccaagtagagctgggattacaggcatgcgccaccatacccggataatgtttacatttttagtagagatggggtttcacaatgttggccaggctggtctcgaactcctgaccttagttgatccgctggccttggcctcccaaagtgctgggattgcaggcatgagccactgcaccctgcctctgcatttttcttttctttcccttttcctttcctttttcctgtttccctccctctcctccctctccctgtctctggctctcacgctctttcctctctctcttttgagacagtctggctatctctcccaggctggagtgtggagtgcagtggcgtgattctgattatagctcactgcaccctcgaaaccccgtgctcaggtgatcctcccatctcagcctcctgagtggctgggactacaggtgtaaaccactgcgcttggctaatttttaaattttttgtagagacgagggtctcagtatgttgcccaggctggtcttaaactcctgggctcaagtgatcctcccaccttggcctctcaaagggctgggattacaggtgggagccgtgcccagcctctgcctatggcatttcttccctgtacccttgatgggaagctcccacccctagtaccatagtgcctggaacattctcaaggatcgtttactaattaaatgatctggtggaagccaatgctcaggggagaggggggtgggctgggcctggtttctcccatctctcatctttccccagccccctctcatcagggatcatgatacatcattgttgtcatcataatggctaacatttatcaagcccttaataagtactagttacatatccatatgttggcaatgtcaggttaagaaaatatgtgcgtggccaggcgtggtggctcacacctgtaatcccagcactttgggaggctgaggcaggtggatcacttgaggccaggagttcgagaccagcctggccaacatggtgcaaccccgtctctactaaaaacacaaaaattagccaagcatggtggcaggcacctgtagtcccagctactggggaggctgaagcaggagaatcgcttgaacccgggaggtggaggttgcagtgagccgagattgcaccactgcactccagcctgggtgacagagtgagactcttgacacacacacacacacacacacacacacacagaagaagaaaattgtgtgtgttcgtgtgtgtgtgtgtgtgtatccagagagttaaatataccattttcccattttagggacgaagaaactgaggtgaggtcacctgcccgagtgatgcagctagttggcagcagagtgggaccggaaccctgctgccaggtctgtgtgcggtggaagtggtggtcacggcctcacctgcacccctcgctcctccaagtgtcggatcagactcttcctcatgatcagcctgggggtggggtggggacgtgggaggtgatgatgagaggggacctgggagaagggcagcagtaggtctctatggggacacgccacccagccatcttgcccacctcaccatttcgaaaccacagccaataactggttcaggcaagagcaggaaaatgggaaataggtcctgcagagagaaggaagtgggggttagctcctagggtctcccctgtcccagaggtggggtgggctggtagtgcccccgccaactagggtagcgctgccctcccaccccccagaatcccccagaataacctttgtagttgccccagtgaacaattcacccattgttcagagagcctactctgaccaccacgcttcaagggtgtggccctccagtcaccattcaccagataaggaatctgggccttagagaacgaaagggacttgccagacccaaagcagagtggtggtggggctgggccagggcctcgcttggttccaaagctggacatccaggctgcaggccctcctggttgggcctggccagcttcttatttatctatttatcttattattaatttaaattaatttttttttttttgagacagagtcttgctctgtcgcccaggctggagtgccgtggtgcgatcacagctcactgcaagctccgcctcctgggttcacaccattctcctgcctcagcctcttgagtagctgggactacaggtgcccgccaccacgcctgctaattttttgtatttttagtagagacagggtttcaccctgttagccaggatggtctcgatctcctgactttgtgatccgcccgccttggcctcccaaagtgctgggattacaggcgtgagccaccgtgcccggccattaaaaaatttttgtagagacatgtctcactatgttgcccaggctggtcttgaactcctggactcaagcaatcctcccgcttcagcctcccaaaagtgccaggataataagcacgagccagccaagtgtggtggctcacacctgtaatcgcagcactttgaaagtctgaggtgggaggagaccagcgtggccaacatggcgaaacgccgtctctactaaaaatacaaaaattagccgggcgtggtggcagaccctgtagtcccagccacttgggaggctgaggcaggagaattgcttgaacccaggaggcggaggtttcagtgagccaagatcgcactactgcactccagcctgggccacagagtgagactccttctcaaaaacaaaaaacaatggccgggcgcggtggttcacgcctgtaatcccaacactttgggaggccgaggcgggtggatcacctgaggtccggagttcaagaccaccctgaccaacatggagaaaccctgtgtctactaaaaatacaaaattagccaggatggtggtgcatgcctgtaatgccagctacttgggaggctgaagcaggagaatcgcttgaatctgggaggcggaggttgcggtgagccaagatggcaccattgcactccagcctgggcaaaaagagcaaaactccgtctcaaaaacaaacaaacaaacaaaaaacccacaaaaaacctcgtgagccactgtgcccattggccagcttcttgagaccagacagcacttagtgggacgacccctaattatcccactccaggggtgactttagagacccttgacagtgtcctagggcaggctctggagtcagacccagggaaaacctaagctctggatttccagctgtgtgtccttgggcaaattacagaacctctctgggcctcagattctctagggtaccatgggagtcatgattcttatacctcctgggggtgctgcaaggtaaaagtcaacccaaaatatgttaaaacactttataaatcttgtataaggccgggcgcagtgggtcacgcctgtaatcccagcactttgggaggccgaggcaggcggatcatgaggtcagattaccatcctggctaatacggtgaaaccccatctctactaaaaacacaaaaaaattagccgggtgtggtggcgggcgcctgtagtcccagctactcgggaggctgaagcaggagaatggcgtgaaccagggaggcagagcttgcagtgagccgagatcacgccactgcactgcagcctgggcaacaggggaagactcctcaaaaaacacaaaaaaaatccggtataaaaaggtggtacacaaatatcattgatctctttgtagcaaggtattgtgggggctgagtgggacttccttctggacaacagaggggagcagagagctctgggactaccacagagaagctgtcagaaagcaaagggagaccgggcccaggggctcaggtatgtaatcccagcactttgggagaccaaggtgggaggctcgcttgagctgaggagttcaagagcagcctggtcaacatagtgagaccttgtctctacaaataatttaacaattagccaggtgcagtgttgcacgcctatactcccagctacttaggaggctgaggcaggaggatctcctgagcccaggaggtcgaggcgcagtgagtcatgatctggccactgcattccagcccgagcaagactgtctcaaaaaaaaaaaaaaaattgtaaagcaaagggagggactaggcttaagtgccagcgaagtatccaaattcctgatcctttccccagctgttactttgttaacccctgccttcctgcagaacactgacttggccttttcctgctgagggtctgagacagccgtgctataattaatgaacgaatgtctccccagccagactgtaagctcaccaaggacctctccccaccctcactggtctcatttacacattataactgcacctgggacagagtagacattcaataaaatatgctagatggcctgagatggataaattacctctctatcctaaaactccacatatgcacagaatttcagggtgttcacagttcccttagtattcatgaatgctgggtaagaaccactgtccttaaaagaccttgggggttatctctgaggggagctggggagctgggaagatctgggctccttctccacggagaccctaagcagtggggagtttttctgaggtccgccccccactggtacctgttgatgatgttgggcaggaagcagaagaagaacttctcagggattgggatgaagggcagcagccccaggtagtaggaaagcagcacccagaatcctcggcttattgtgaaggacaggggcatctcggggttctggggaggcaaggagaggcatgagaatctgtctgctctggggaagcagagaggaggcatgagctgcaggggagccgtggtgggcattccagaggccctactacctgcaggatccaagtcacatcttggggctgggtgtggtggctcacgcctgtaacctcagcagtttgggaggctgaggcaggtggatcacctgagatcaggagttcaagaccagcctggctaacatggtaaaaccccatctctactaaaaatacaaaaattagctgggcgtggtggcgtgcacctgtaatcccagctactcgggaggctgaagcatgagaatcgcttgaacccaggaggcagaggttgcagtgagccgaggtcgcaccaccgcactccagcctgggcgacagagagagactgtgtttcaaaaaagaaaaaaaacaaaagtcacatcttggctctgtgttcgaggcctgagttcacacccttttcattgccaccgccacgccactgggaactctcccagacccctctagctcgggtccccatgctgggtgggctccagctctggggaggaggggcccctggaggaggaagaggacgggggaggggtggggggactcacggcagccttgcatttcttcatgaccgagctcttctccgaggcccagatggtgatttcattacggtcatagcgtctcaccaagcctgctatctgggaggaggagaaggaggtgaagggagagccaggcctctctcacgcccccggtggccgccctagccctgcctgcagcaccacctcacggatgagctcttcgttcttccctttgatctctacgctcatgggtgtccttggaaacctctggaacaggtcctccagacgaaccatgcgccggtctgacccgtgagcaaagtggcctgggggtggtgtgggaaaaggggtcagagggaagccaaggcggaggtccaaggaaggcaggcatggcccaggcagggctcgaagcccttgctctcacctggagagaagtaaacctccagcttctccttgtagaggggcaggtcctggggaggacaggaaggatgtcactagaggcccgcattgggcatggtgactctcagggtgggggttggggtgtcagggcagggcccacctcgaagtccaggctgcccacatccctgtttaggcccgactggcggcacaggttctcatcatgtgacaccaccaccactctgtcccgtgtcagctgacagtcgagctccaggaggtccgagcgctgggccatggagctgtgggggtgaaggtcagcggggggcaggggcaggggactgggatgaggggcatggtggctgggaggtggccgggaatgtgagagcggagttcgtggcgggatgtgcaggccacctccagggggcgccagtcacccagctaggaagtgaatggcgtcccttgctgtgatgcagtccacgacctgcacaccctcacatggcagcctgggcaggggcagatacactcacttctccatggcctccatggtgttctccagcagctctccagatcctgtggggggcactggagtgggcctctggggcttggggtctaggggcctggcccaacctcatcacccacattccctctctgggctccatcctccctctggcctcacctccccagccagcccaggctgcgccagcatcttcttcctcgtccacaccctgccctgccacttcgctctccttctctcttggtccctgccccgtttctagcatgcccccttggacctacccctctgtgctgtccactttggcacctgttctcacccctacccggctcacctcctcggtgggcccccaggcggatgcggaaggtgggagccctgggcgtgtgcagcagatgaggccggcgcaggaagaagatggagagcatggcatagctgcccagggcagggagggcatagtacagcaaaaggctcatgaccgtactcccacagaagctcctgcagccacacgctcagccgtccgcgggactgtgctgcctgcctagccagtgtggg

SEQ ID NO: 78 - DNA, 9205 bp, Homo sapiens
tcagccatagacacatctctatatttatatattagacgggtcagggaggtggcaggggcgccgggctctccacgccccccagctccacttctgctcaccacacacagaagcagcgagggcacgcgaagtgacagctttgacagggaggggattcggcccggcctggctcctcagggatgctagcccttgagactaaggaatgttccttcagggaaactagggtggggtttgaatgagatgaggggggcaggcatggccctgagtccctactcagcgccccccaccctccacctctgcccttcagcaggttggggcagccagaacccttccattccagaactgccagagactgggacgctggggaaggtaagggcgcagcagcagcagcgggagattgaactggggccacctgaggtcccgaggccccgtggggagggcgggtggggaggagaaggccttggcctgcctgaagctggaggcctcagcaaaggagagaggtggccaggcccatgctccaccccggcctgggctgccaaggtccgggctgggcacagtgtccattttctaacagtctggcgggagaggggcaggcaggaggcaggtcctaaagagagaagcaggcagaagaggagtcgttagcaccccccgggcagacccactggagccctgacctcaacatctctcatttcaccctcacagctggataggctgggtctcagtttccttatctgtaaatggagataataatagtacctagcttgaggtactgctgtaagattaaaggaattaatacatgtaaacctcttagaacaatgcttagggctttatgctttcattattagaactgtctcggccgggcacagtggctcacgcctataatcccagcactttgagaagctgaggtggtggatcgcttgagcccaggagtttgagactggcctgggcaacatagcaagaccccagctccacaaaaaaaaaaaaaaaaaattagccggttgcaatggctcgtccagctagctgggaggatcccttgcacccaggagttttgaggctgcagtgagctatgattgcaccactgcattccagcctgggtgacagagcgagacactgtctcaaaaaaacaaaaccaaaaaaaaagataaatagattgactccggaaactgaggcgccgagaggtgaggtgccttgcccaatatcacacagcacttactaagtggcacagctggagtttgagcccaggtgcgcatgccttctttctatcaggccacacctggctgaagacaggaagagaccggaggaggcaaggaggcagcgtgggtgggggcaggccagtggggtccccacagctatgtgaactgctgatctggcagcaggtgtgaggaggcctggcaatctgggtcaggctgggcgctgctgggcccctcccaaagcaatcatggccccacctgcttctgccacacccagagctgaagcttggctcaggtcctcacctgggtgacagaggccctcagtgacctcttgcctctttgccagttctgttcctagaaggagattagaatggcttgtggggctggaggatgcaaggtgttgacaggcagagacatttggggctggaggactcggtgggccaccagtctgggcagccttgggcatttttttttttttttttgagatggagtcttgctctgtagtccaggctggagtgcagtggtgcgatctcggctcactgcaacctctgcctcctgggttcaagcaattctcctgcctcagcctcctgagtagctgggattataggcatgtgccaccacacccagctcatttttgtattctttacagtagagaccgggtttcaccatgttggccaggctggtctcaactcttgaccttgtgatccacccacctcggcctcccaaagtgctgggattacaggcatgagccactgtgcccagcccttttttttttttttttgagagagtctcactgttgcccaggctggagtacagtggtgcaacctccgcctcccaggttcaagcagtcctcccaccacagcctcctgagtagctgggactagaagcgcatgcctacgtgcccggctaatttttgtatttttagtagagacagggtttcaccacgttggccaggcaggctggtctcggactcctgacctcaggtgatccacttgcctcagcctcccaaagtgctgggattaccagagtgacccactgtgcccggctaatttttgtatttttagtatagatgggatttcaccatgcaggccaggctggtctcaaactcctgaccctcaggtgatccactcctctcagtctcagtctcccaaagtgctgggattccaggcatgagccaccacacccagccccctgggcacttctgttgtcaccagacacattgaccatgggtgtggggtaagcttgctgctgtatggaggcatgtacagatagatatagatatagatatacagatatagatatttagtatcagggtgtccatgtgtgggccatggagacactcaccaggccccagggtgcagagatgtctgtctgggctagggggcctccagcactccgggctggaagcgtgctgtctcctggaagatgagctccttcagccgctccttaggtaggtcatccagctccatggcgaaggtgaagggctcctcggccactggctggggtggtagagacagcaaggctcaggcctggcatgggggatgcctacgtgcccccctgctcccctgcccccagccccactgctgctggggactggcccacctcatccgtcgggtcatagtactgctccaggtaggggtgagccagcgcttcctccactgtgatccgtttattggggttaaaggttaacatccggtccagcaggtcaagggctatggaagggcaggagtcaggggtcacagggaagactggaggagctccgagaagcattgctttgcctgtctcctccagcggctgctgggctcacacaccctccacgacacccaaggtttatcccacacccaccctcatgtctctcgaacctttggagtctgacttggggaaaagcttggcccaagccaccttggtcttggagggcagagactgtaggtagtttcgggccttcatgttgatgatacaattcaggtcctcctgggatggggagcccaggatgcctgtggataaggaggtgacttggtaaatgatcacctctttctttctgggaacagaataggcaacaaggcaagaacaagaccccccagcccagcaacccatgccaatccctcagtcacctcctagtcattagcatggtggtgcagagcaagggggctgggttcaggcagaccgaggctcaaatcctaggtctggtgcctcctcaggtgtgggacttagccttgcttttcccatctatccaatggggataatatctatacctcattgagataccatgagatgctggaggcaccccacacgtggtggtatccctgacttggactctcgagaaatctcacctcggaaaagctaatcatccccaactcagccagccgggcctccctcacccagaatgtggttgagctgatccaggtagtgcttgccagggaagatgggccggttagagagcatctcagccagaatgcagcccacagaccagatgtcgatggacttggtatagccctgggggagaggaggaagtggtgagctcctgggccagcctcaacagggtcctgttgtctgcgccaggccaccacctccaagttagatccaacaccaggcagaaggcagaggcctggagggctcaatgctcagcttccttgcagagcccaaggcccagagggtagaattcctgtgtcatgggggtcagtgtctggctcagaggtagctccagggcttcctgggaactggtccgttcctttcaggagtgggcagcccctcctaccttggagttcagcatgatctctggggcccggtaccagcgcgtagccacatactccgtcaggaagccggtgtggtcatgctcaggatcggcaatccgggccaggccgaaatcacaaatctggaatcagacctagctgctaagctcggcgctcaaggcctctgcagcctaagcagtcacgcccccttgtctttgcctccactgttccctttgcttgcaatgttctcctgcccaaggcttcttctactggtcactggaagccccagaccctgggggaggaggggacaggtgcccaaccctctgaccttaaggtcgcaggtggtgttgatgagcaggttggagggctttagatctcggtggagcacgttggcggagtggatgtacttgaggccccgcaggatctggtagaggaagtagcagatatggtcattgctcagctgctggcttttcagcaacttgtacaggtcagtctccatcaggtcctgcacaatgtagctgaggatggttccgcagacccccccaggcagggggcagtgggaggcacttggttaaggaaaacaggctctgaaggcgaggctgcacacctcctccagccagggcccctgggactcaatagatctgccaacctgcaccaccagctggggaagctgctgccattacccagcggcagggctctgagcctctgttgcatcacagttgctgatcctgagcaaggggcttcatttctgaggcctcagtttccctaccggggaaacggggataataataaactgtgggaggcaggagaacttcacagttaagagcagcaacttgggccaggagtggtggctcacacctgtaatcccagcactttgggaggctgaggcgggaggactgcttgaggccaggagtttgagaccaccagcctgggcaacatggcaaaaccctgtctctactaaaaatagcaaaattaactgggcacggcggcatgtgcctgtaatcccagctactcaggaggctgcagcacgagaatcacttgaacccaggaggcagatgttgcagtgagccaagattgtgtcactgcactgcagcccggatgacagagtgagactctgtctcaaaaataaataaattaaaaaaaaaaaaaaacctacaaaaagagcagcaactctggagttaacccatggatgtctgaaatctcctctctactactcactggctttaggatctcaacctgtctgtgcctcaactttctcatctggtatgtaggggaaataatgtttttttgtttgtttgtttgttttctttttgtggagatgggctcttgctctgttgcccaggcaggtcttgaactcatgggttcaagtgttccttccacctcggcctcccaaagtgctggaaattacaggtgcaagccatgaaataatggttcttttgagggtggttgtgaagactagatgagatggcgcatgtaaagctgtcagcccagtgcttggcaagttgtgagtgctaggcaaacatgaactattattactaatatgaatgcctgagtcacatggctgttgagggagttaaatgagataatgtatgaacaccatctggcatgcaataaatgtttgcttaaaaataaatgcctgccttatgggaatggtttgtgcaagaaaaatgaggagacactcccaacagcacactcccactcaaaggagagtgcttggccatacctcagaagatggaggagtaaaatgtctttttctatttgaagatacaaaaaagcttatgcgtaaataaataaataaatccacaaatgctgtttggcttgtctctagaaaaataagtcagggctgtcttttagaatctgccttgagaccaggcatggtggctcatgcctgtaatcccagctcttcaggaggccaaggtgggttgatgacctgaggtcaggagtttgacgccagcctggtgaacagggcgaaaccccgcatctactgaaaatacaaaaattagccgggcgtggtggcaggcgcctgtagtcccagctacttggaaggctgaggcaggagaatagcttgaacctgggaggtggaggttgccgtgagctgagattgagccactgcactctagcctgggcaacagagggagactccatctaaaaacaaacaaacaaaaaacaaagaaaacaagaatcagccttgaaagggtcttcagagaatatgtggaccagccctgctgttttagggctggggaggcccagcgagacgcagtgacttgcttcagatcacacagcgagctgggggtgagcacggagatttcctgtccacagtttgtggtgggggttgcagacacctcagtacaaatccccactcttgggtggagggctgggactgagagtgggtgggtggggcagggaagaagtgacaggtgtcataagttgctaaggagagccagacaggaagtggacagcaaactaggaaagcagtattgggggaggacagccaaggctaggctgtccctccctgggcaaggtgcaagtccacaggtgattagggtgtggctctgagtgagaagtcctaagaagaaggacaagttcccatctgggggaggagaggaggagacagcaacagaaacacttgattttaggttttctgagccttagcttcctcatctttttttttttttttttttttgacagggtcacgctctgtcccccaggctagagtgcagtagcacaatcatagctcactgcagcctcgaactcctaagctcaagccatcctcctgcctcagcctcccaagtagctgggactatagtcgtgtaccaccaaacctggataatttttaaattttttgtagaggtggggtctcactatgctgcccaggctggtcttgaactcctggcctccagtgatcctctggtcttagcctcccaaagtgttgggactacagatgtgagccattgcactccacccctcatctttgaaatgaagctgaaaagcccatctcatagggtagttgggaggtgtaatagaaaaaaaaaagcattgggcatgtatagtacctgacacacagcaggccctcaagaaaggcagttttttgtttttgtttagttttgagacagagtctcgctctgtcacccaggctggagtgcagtggcacgatcttggctcactgcaacctccagctcctgggttcaagcgattctcctacctctgcctcccaagtagctgggattacaggcttgcaccaccatgccccgctaatttttttgtatttttagtagagatggggtttaaccatgttggccaggctggtctccaactactgacctcaggtaatctcccacctcagcctcccaaagtgctgggattacaggcgtgagccaccacgcccagctgacagttttctttctccctgtctcccttccggtctgggcaaggaggaaagagaggaaagaatcatccattccttagcaagaagtgactgtgggcagaggccaggtcatgtctcagaactgccgacgtcagaagacaccactcccatagagaccatcctgcctagcccttccccctggggcacagagcagagaacccacttgctcgaggccatactgcctgggccgctgcaggcctgggttcatcagaggtctccaagtcctgttacactgtggcttcccctctgcaggaaagtttattttactgggtttgttttggagggtggtgggtaagatggaaacagaaaccaagcaacgggtccccagcccagctgcgaggccgtgcctgaccagccgactggccaaggtgaaggatacacatctctcatggcttccagggtggacgcccgcagaatgtctcggatgccgatgacattctcatggcggaagcgcagcaggatctggatctcccggagcgtgcgctggcagtaggtctgatgttcgaaggggctgatcttcttgatggccacgcgagtcttgcgcacgtggtcataggccgagctgaggggaccggagagaggctgctgctgtggccttacaaagggggagtccgggcctggtggccccacccaggccttggcagggaggggagagagcaggagctggctctggtcaaatcataaacaatgctggttccttcctgctgtggaggcctgggatctccagagagaaagctggggaccagccaggcggcccttcggtgactttacaaacagaggaagagactgaccgctcactgacttcccctctcctcaatccccttccattctactggccctgaacccttcgcccccattcccaggaaaggctccttaacccaagacaggtccgggggtgcagatgctggggacacaccatggggcaaatactgggaaggtggcagccaggggaggggcaggagagaatggacagggcaggggagggtcccagggtgagggatccgggcagcggggctgtcccagagggatagaggcccagagcacacggtggggccgggggcactcacagacccctcccaaaacatgcaggtggcactcctggccgcctcatctctctctgggcccctggggtggtggggccaaagccctgccccaccctgatctcggctcttctcccccaggctccctggcactgcctcacagggggaatccaagacaccctttcccccaaaacgggccctccactgcctcttcactaaggatgtcgcctccccgagagtactcatcctctgggcctcgccccgtgtcactagggtccccgcgggcccccacatgcactcggatgcccctcccatcattacagaagggtggactcaaagcctccaagcctgctcccctgaggacgtaggcagcgccccctcccccagaaagcactcaggggccccctccctgggacgctcccgatcatcccgagtctcctgcctcctcgggacgctccgcgtctccacgtcccggaaagcgctcggcgcctcctcctcctctcccgcgaagccccctcccctgagggcaccccctcccccggaacgccccctcacctgaccatgccgtacgcgccctcgccgatgtactgcaactgcgtgtagcgcgggcccacgtcgaacggctgccccttcaccatctccacctcccccgggacccccgggccgaccccctcggttctacggggctccccgcccccgcccccctgagccgccgccgccgccatctccactcctcccctcccaccgccctcctccccacggcggccccgcccgaggccccgccccttcccgcctgcctgtcacccgcagggccgcgcgcgccag

SEQ ID NO: 79 - DNA, 5472 bp, Homo sapiens
cattgtcttgacaagagcatcttcagcgggcgagtccccggctcctccagctccttcctcctcttcctcctcctcctccacctccggcttttgggggatcactgtcctctctcggcagcaggtgaggctgggcctgggaggcgcgggtgggccggggcgagggccacctgtggggcggcgcgcgcgtgggagccgcgggctgcgggggcgcgcggctgtcaccgcgacccagccagcgccggggccaggtagcgggcgcagcagcccgtggggggacgctgcttggagtgggggccgccggggccccagagcgctctgcggaggcgagggctagggaccaccgcggccaagatggaggtgggtggccgggggtcagcacagtgtcgagggcccgactccccacggaattgagtctcggggagggtggggacgagggcagggtggggtgagcggggcagctgccctgggcttggagacaggaaggggttgagagcaaaacaagaaaagaccaagttcccctttccgtggtttccgggcctggtacctgtggtgggggaggaggcagggtggggcgatggcttcctgtcccccacctctggtccggggctcccctctctccagatacaggctgctcctcaagactggggctcttcacatacgctcctcaccgctctttgggcaggccgacctagcagcctcttcgggagtcctggggtggccgggggtgctggagcccccagtgagtaggcgaggctgaggctaggggcagaggctctgggcatggcaccctccaagcggcagcacaggccccttccctgagcaggaaggtgatgcggtggcacaaggtcgcccctggagttccttgctccccacccagacactgggggaaaccatcctacctggacctcagagcagtcggagtggcctctcccttcctgtgtgcagtttacatgggggtggagatggctcttaagggcacctgcttttctgagcggaggcgagaggcagaggtatggggaggaggagatacctggacctgagccagagacctgctggggaagctatcctgccgcctcactcccctcaggcagcccccacgccacttcctcctgtgtccagccccatgccagcaggcgagggaggccagctcctgtccctgcctttaggaagcgctgtgtgggtgtgagggaggtgggctctggacacggtaactaagagagaacccaccctcggagccatctgggctgatgacgcctgagtctgaaccattaggaaggacgggctctgcatccatcagccagtcagtcaacaaacatgcagtggggcaacaccacgccaggctctgttgcagaggctgagggtacagattgagagggtggctcagagtggcctggggccagggagaagggggcttgcaggttagagggaaggagaggctggggaaggcaagcaggcatcagccacagagggaagaatagggagcccctggagatgatgctgggaccttaaaagccagactgaggggtgtcctgggggaggtggggaccactggaagatcagagttgacctgaagggagaaatgctcttatgctgtgtgcccccagaatgagccggcaggtggtccgctccagcaagttccgccacgtgtttggacagccggccaaggccgaccagtgctatgaagatgtgcgcgtctcacagaccacctgggacagtggcttctgtgctgtcaaccctaagtttgtggccctgatctgtgaggccagcgggggaggggccttcctggtgctgcccctgggcaaggtgagcccctggggccctggggggagcagctcctccaccggacccatggctctgtgcaggtcctgattaggtgacggtcaccaggccttccagggcctgtgttgccatctggaaaactgagctgggccccatgagccttacacttcctccagctcctctgtgctgtggctgtgtggaaactgacgctcagaaggagccaacacaagatgggtcacaccagtgaccaggactacagacagtcctgcagacccatgatcagccctcctgagcctcagcctggggctttctccccatggaaacacagagggggttgggatggggtctgggggccctggcagcgttctcagggttgggagggactctggctctgggcctgtctgaggacctagcaactctgtcccccagctcgcaggcagggatgatgcaagaggtgctctcccccacccgcagccctgccctcccctggagcctgctgccccctccgctggctggctgctgccccgcacccccagcacactcctgtgctctttggggggtaagacaggaaggggagatgggccccaagttgttaccttaaaagggctgatggaagcaaagagaagaggaagtggttgtcggggtgagagctgggcccgcgccccacatggctgtcacacaggaagccctgctgaagcagctgtccccggaagaagccatttccaaacctctgctcctgcctggggccagttgggacaggctccctggcccctctccttttgggaggacccacccctgcagccccaccactcacactcgctctctggggagctgcctccacccccccagcccccatacacctgtcctggctccagggccagttgtgcccatggaagcctcactcggggaagctggggtgggggtgccaaccctaagggcagagacagactgagacagagaccggcgggaactctgccagggtcttgcacggcccccaacctctgccatgcgtggccagccctcctggggtttgcccaggccattttgggactggaacaagagaagaacaacccgcccccgtccccaccccaggccctggtccagctcccagggacaccacagctttcctctctgggcctctctgaaggaggtgtggggaggttggattgggtttgggaggcaaaagcacctccaaggccctgctgtgcctttagactggacgtgtggacaagaatgcgcccacggtctgtggccacacagcccctgtgctagacatcgcctggtgcccgcacaatgacaacgtcattgccagtggctccgaggactgcacagtcatggtgagtggtggtggggacccaggggctgggagaggggctctaggatgggatctgacatttggagtcctgaagactcactggcccctcctctgcaggtgtgggagatcccagatgggggcctgatgctgcccctgcgggagcccgtcgtcaccctggagggccacaccaagcgtgtgggcattgtggcctggcacaccacagcccagaacgtgctgctcagtgcaggtgctgcgggaggaggggcttgggggtggctcgtggcctgcagtggatgagggcaggaggctcatggcttctgacactgtggggaacgtgcaggttgtgacaacgtgatcatggtgtgggacgtgggcactggggcggccatgctgacactgggcccagaggtgcacccagacacgatctacagtgtggactggagccgagatggaggcctcatttgtacctcctgccgtgacaagcgcgtgcgcatcatcgagccccgcaaaggcactgtcgtagctgtgagtcgccatctaccctgacctttgaccctacagcctttatccttcttatccaccatcagccaggcccttggatgctgccctccctcgcctccacctgggactggccccgtagggtatgtacgggtgcctgacctaccacctccctttccttgcaggagaaggaccgtccccacgaggggacccggcccgtgcgtgcagtgttcgtgtcggaggggaagatcctgaccacgggcttcagccgcatgagtgagcggcaggtggcgctgtgggacacagtgagtgctggggcaggaagccgagggcccccaggctgggaaccaagactggaggtttcgtccctgctctgccactcacctggcaggatggccatgggcctcagtttacccaggcgtgagatggttgttcccactggttggtcgggagggccctcacaggtcactgcccagggaagaccaccatcccagggcctgggatgttacctctcacctgtgtctacagaagcacctggaggagccgctgtccctgcaggagctggacaccagcagcggtgtcctgctgcccttctttgaccctgacaccaacatcgtctacctctgtggcaaggtggcctcgtcgggcggggtgggggtgggaggtgggcaggatgggcctggagagggccagggcagtgggcatccgctggtattgaccctccctccacacctgccacctacagggtgacagctcaatccggtactttgagatcacttccgaggcccctttcctgcactatctctccatgttcagttccaaggagtcccagcggggcatgggctacatgcccaaacgtggcctggaggtgaacaagtgtgagatcgccaggtgactgacccccggccctgaccgcagcatgctccttgggcagtgggcagtcccaagcccacccaaccagactgtgggccccgctcaccttccccttcccacaggttctacaagctgcacgagcggaggtgtgagcccattgccatgacagtgcctcgaaaggtgatgctcccccgccccaccctgggctccaggctgggcactgactttgcggtcttgtggggggtgtcctggcataagcgctttcctcactatccctggccttgcccacagtcggacctgttccaggaggacctgtacccacccaccgcagggcccgaccctgccctcacggctgaggagtggctggggggtcgggatgctgggcccctcctcatctccctcaaggatggctacgtacccccaaagagccgggagctgagggtcaaccggggcctggacaccgggcgcaggagggcagcaccagaggccagtggcactcccagctcggtgagagggctgggaagccagggaataaaactgggagggtggggtggggctggtgtttggggcacctcaaactcacaacattgggaatctttgtgggtccgggaatggtaatcctgaggcctcagaacacaggtttcagattgataggcctgcaggtctccaggcagcaaccagctgagcgactaaagggcccaaggccagggctctagggatggggctcagcagaggctggggtaaggggagccagggaggagctgggcctaatgcagcaccgggtccccaggatgccgtgtctcggctggaggaggagatgcggaagctccaggccacggtgcaggagctccagaagcgcttggacaggctggaggagacagtccaggccaagtagagccccgcagggcctccagcagggtcagccattcacacccatccactcacctcccattcccagccacatggcagagaaaaaaatcataataaaatggctttattttctggta

What is claimed:

1. A method for diagnosing an autism spectrum disorder in a human individual or a human fetus, the method comprising determining whether or not the human individual or the human fetus carries an about a 500 kb long microdeletion or microduplication that is flanked by an about 100 kb to about 147 kb long segmental duplication on a chromosome 16p11.2 region between 29.5 Mb and 31.1 Mb, wherein presence of the about 500 kb long microdeletion or microduplication that is flanked by the about 100 kb to about 147 kb long segmental duplication on the chromosome 16p11.2 region between 29.5 Mb and 31.1 Mb is indicative of diagnosis of the autism spectrum disorder in the human individual or the human fetus.

2. The method of claim 1, wherein the microdeletion or microduplication comprises at least one gene selected from the group consisting of: BOLA2, GIYD1/2, SULTI1A3/4, SPN, QPRT, c16orf54, KIF22, MAZ, PRRT2, c16orf53, MVP, CDIPT, SEZ6L2, ASPHD1, KCTD13, LOC124446, HIRIP3, CCDC95, DOC2A, FAM57B, ALDOA, PPP4C, YPEL3, GDPD3, MAPK3, CORO1A, TAO K2, and TBX6.

3. The method of claim 1, wherein the microdeletion or microduplication comprises SPN, MAZ, TAO K2, and TBX6 genes.

4. The method of claim 1, wherein the segmental duplication is about 147 kb long.

5. The method of claim 1, wherein the segmental duplication is SEQ. ID. No. 54 or 55.

6. The method of claim 1, wherein the determination is performed using an oligonucleotide-based array comparative genomic hybridization (oligonucleotide-based CGH).

7. The method of claim 1, wherein the determination is performed using a bacterial artificial chromosome-based array comparative genomic hybridization (BAC-based CGH).

8. The method of claim 1, wherein the determination is performed using a fluorescence in situ hybridization (FISH).

9. The method of claim 1, wherein the determination is performed using a multiplex ligation-dependent probe amplification (MLPA).

10. A method for diagnosing an autism spectrum disorder in a human individual or a human fetus, the method comprising determining whether or not the human individual or the human fetus carries a between 500 kb and 2 Mb microduplication on chromosome 15q13.2q13.3 between a BP4 and a BP5 region, wherein presence of the between 500 kb and 2 Mb long microduplication on chromosome 15q13.2q13.3 between the BP4 and the BP5 region is indicative of diagnosis of the autism spectrum disorder in the human individual or the human fetus.

11. The method of claim 10, wherein the microduplication is about 500 kb long.

12. The method of claim 10, wherein the determination is performed using an oligonucleotide-based array comparative genomic hybridization (oligonucleotide-based CGH).

13. The method of claim 10, wherein the determination is performed using a bacterial artificial chromosome-based array comparative genomic hybridization (BAC-based CGH).

14. The method of claim 10, wherein the determination is performed using a fluorescence in situ hybridization (FISH).

15. The method of claim 10, wherein the determination is performed using a multiplex ligation-dependent probe amplification (MLPA).

16. A method for diagnosing an autism spectrum disorder in a human individual or a human fetus, the method comprising determining whether or not the human individual or the human fetus carries a between about 500 kb and about 2 Mb long microdeletion on chromosome 15q13.2q13.3, wherein presence of the between about 500 kb and about 2 Mb long microdeletion on chromosome 15q13.2q13.3 is indicative of diagnosis of the autism spectrum disorder in the human individual or the human fetus.

17. The method of claim 16, wherein the microdeletion on chromosome 15q13.2q13.3 is located between a BP4 and BP5 region of the chromosome 15q13.2q13.3.

18. The method of claim 16, wherein the microdeletion is about 500 kb long.

19. The method of claim 16, wherein the wherein the microdeletion comprises MTMR15, MTMR10, TRPM1, KLF13, OTUD7A, CHRNA7 and miRNA gene (hsa-mir-211). genes.

20. The method of claim 16, wherein the determination is performed using an oligonucleotide-based array comparative genomic hybridization (oligonucleotide-based CGH).

21. The method of claim 16, wherein the determination is performed using a bacterial artificial chromosome-based array comparative genomic hybridization (BAC-based CGH).

22. The method of claim 16, wherein the determination is performed using a fluorescence in situ hybridization (FISH).
